(19) United States
(12) Patent Application Publication
(10) Pub. No.: US 2020/0323772 A1
(43) Pub. Date: Oct. 15, 2020

(54) TREATMENT OF INFLAMMATORY DISEASE USING INGESTIBLE DEVICE TO RELEASE IMMUNE MODULATOR

(71) Applicant: Progenity, Inc., San Diego, CA (US)

(72) Inventors: Mitchell Lawrence Jones, La Jolla, CA (US); Christopher Loren Wahl, San Diego, CA (US); Sharat Singh, Rancho Santa Fee, CA (US)

(21) Appl. No.: 16/639,082

(22) PCT Filed: Aug. 13, 2018
(86) PCT No.: PCT/US2018/046551

§ 371 Date: Feb. 13, 2020

Related U.S. Application Data
(60) Provisional application No. 62/545,894, filed on Aug. 15, 2017.
(60) Provisional application No. 62/583,969, filed on Nov. 9, 2017.
(60) Provisional application No. 62/596,041, filed on Dec. 7, 2017.
(60) Provisional application No. 62/599,005, filed on Dec. 14, 2017.
(60) Provisional application No. 62/599,000, filed on Dec. 14, 2017.
(60) Provisional application No. 62/650,900, filed on Mar. 30, 2018.

(51) Int. Cl. A61K 9/00; C07K 16/28; A61K 9/48; A61P 29/00; C07K 16/24; A61K 38/13; A61P 1/00; A61K 31/436

(52) U.S. Cl. CPC A61K 9/0053; C07K 16/2839; A61K 9/4808; A61P 29/00; A61K 9/0068; C07K 16/241; C07K 2317/76; A61K 38/13; A61P 1/00; A61K 31/436; C07K 2319/30; C07K 2317/24; C07K 16/244

(57) ABSTRACT

This disclosure features methods and compositions for treating inflammatory disorders or conditions that arise in a tissue originating from the endoderm using an immune modulator.

### CROSS-REFERENCE TO RELATED APPLICATIONS

[0001] This application claims priority to U.S. provisional patent application Ser. Nos. 62/545,894 filed on Aug. 15, 2017, 62/583,969 filed on Nov. 9, 2017, 62/596,041 filed on Dec. 7, 2017, 62/599,000 filed Dec. 14, 2017, 62/599,005 filed Dec. 14, 2017, and 62/650,900 filed on Mar. 30, 2018, the contents of each of which is hereby incorporated by reference in its entirety into this application.

### TECHNICAL FIELD

[0002] This disclosure features methods and compositions for treating a disease or condition in a tissue originating from the endoderm.

### BACKGROUND

[0003] The tissues that originate from the endoderm are linked by, e.g., a lymphatic system. For example, the gastrointestinal tract, gallbladder, pancreas, and liver (all of which originate from the endoderm) drain into the mesenteric lymph system. Although the tissues that originate from the endoderm are succeptible to different inflammatory diseases or conditions, immune modulators that preferentially suppress immune response of the mesenteric lymph system may represent a new way to treat inflammatory diseases or conditions of tissues that arise from the endoderm.

### SUMMARY

[0004] The present invention is based on the discovery that local and/or topical delivery of an immune modulator to the gastrointestinal tract significantly reduced the mean number of pro-inflammatory T cells found locally within the mesenteric lymph nodes when compared to systemic and vehicle treatment. In addition, there were fewer α4β7-expressing T cells found in adjacent inflamed tissues proximal (small intestinal Payer's Patches) to where the drug was delivered (cecum).

[0005] The traditional immune modulator mechanism of action for systemically administered immune modulators is a systemic blockage of immune cell activation (e.g., T-cell activation), a systemic decrease in the secretion and/or expression of pro-inflammatory cytokines, and/or a systemic increase in the secretion of anti-inflammatory cytokines (e.g., systemically blocking T cell surface α4β7 integrin/MAdCAM-1 interaction, which leads to thereby reduced trafficking to inflamed tissues). However, when an immune modulator was applied topically (e.g., locally) to the gastrointestinal system (using any of the devices described herein), a significant, profound, and unexpected reduction in T cell number was observed in inflamed tissues, draining lymph nodes, as well as tissues adjacent and upstream of the topical site of drug delivery. These results suggest that blocking local α4β7 integrin interactions and T cell recruitment may be responsible. It is possible that blocking local α4β7 integrin interactions and T cell recruitment using immune modulators, may be reducing immune cell trafficking or reducing the “imprinting” of T cells to express α4β7 and become “gut homing.” It is possible that topically-applied immune modulators are moving in the extracellular or lymph spaces including from distal to proximal gut. It is also possible that reduced trafficking of these immune cells through the lymph structures is resulting in reduced levels of immune cells in tissues that are not in areas directly treated with an immune modulator.

[0006] The observation of the pharmacodynamics effects of gastrointestinal-delivered immune modulators extend to the mesenteric lymph nodes (MSN), and the organs and tissues that drain into the MSN (a tissue originating from the endoderm), which suggests that locally-delivered (gastrointestinal tissue-delivered) immune modulators may have anti-inflammatory effects for a range of indications beyond the site of delivery. In some embodiments, the compositions and methods of the present invention may be used to treat diseases and conditions that arise in a tissue originating from the endoderm. The endoderm forms the gastrointestinal tract, respiratory tract, endocrine glands and organs, auditory system and urinary system; therefore, the present invention includes compositions and methods for treating diseases and conditions found in the following tissues: the stomach, the colon, the liver, the pancreas, the gallbladder, the urinary bladder, the epithelial parts of trachea, the lungs, the pharynx, the thyroid, the parathyroid, the intestines, and the gallbladder.

[0007] Provided herein are methods of treating an inflammatory disease or condition that arrises in a tissue originating from the endoderm in a subject, that include: releasing an immune modulator at a location in the gastrointestinal tract of the subject, where the methods include administering to the subject a pharmaceutical composition includes a therapeutically effective amount of the immune modulator.

[0008] In some embodiments of these methods, the pharmaceutical composition is an ingestible device and the method includes administering orally to the subject the pharmaceutical composition. In some embodiments of these methods, the method does not include releasing more than 10% of the immune modulator at a location that is not proximate to the intended site of release. In some embodiments of these methods, the method provides a concentration of the immune modulator at a location that is an intended site of release that is 2-100 times greater than at a location that is not the intended site of release.

[0009] In some embodiments of any of the methods described herein, the method provides a concentration of the immune modulator in the plasma of the subject that is less than 3 μg/mL, less than 0.3 μg/mL, or less than 0.01 μg/mL.

[0010] In some embodiments of any of the methods described herein, the metho provides a C₂₄ value of the immune modulator in the plasma of the subject that is less than 3 μg/mL, less than 0.3 μg/mL, or less than 0.01 μg/mL.

[0011] In some embodiments of any of the methods described herein, the immune modulator is an inhibitory nucleic acid. In some embodiments of any of the methods described herein, the immune modulator is a small molecule. In some embodiments of any of the methods described herein, the immune modulator is an antisense nucleic acid. In some embodiments of any of the methods described herein, the immune modulator is a ribozyme. In some embodiments of any of the methods described herein, the immune modulator is a siRNA.

[0012] In some embodiments of any of the methods described herein, the immune modulator is present in a pharmaceutical formulation within the device. In some embodiments of any of the methods described herein, the formulation is a solution of the immune modulator in a liquid medium. In some embodiments of any of the methods described herein, the formulation is a suspension of the immune modulator in a liquid medium.

[0013] In some embodiments of any of the methods described herein, the tissue originating from the endoderm is selected from the group of: the stomach, the colon, the liver, the pancreas, the urinary bladder, the epithelial parts of the trachea, the lungs, the pharynx, the thyroid, the parathyroid, the intestines, and the gallbladder. In some embodiments of any of the methods described herein, the inflammatory disease or condition originating from the endoderm is selected from the group of: gastritis, Celiac disease, hepatitis, alcoholic lever disease, fatty liver disease (hepatic steatosis), non-alcoholic fatty liver disease (NASH), cirrhosis, primary schlerosing cholangitis, pancreatitis, insterstitial cystitits, asthma, chronic obstructic pulmonary disease, pulmonary fibrosis, pharyngitis, thyroiditis, hyperthyroidism, parathyroiditis, nephritis, Hashimoto's disease, Addison's disease, Graves' disease, Sjögren syndrome, type 1 diabetes, pelvic inflammatory disease, auditory canal inflammation, tinnitus, vestibular neuritis, otitis media, auditory canal inflammation, tracheitis, cholestatic liver disease, primary biliary schlerosis, liver parenchyma, an inherited metabolic disorder of the liver, Byler syndrome, cerebrotendinous, xanthomatosis, Zellweger's syndrome, neonatal hepatitis, cystic fibrosis, ALGS (Alagilles syndrome), PFIC (progressive familial intrahepatic cholestasis), autoimmune hepatitis, primary biliary cirrhosis (PBC), liver fibrosis, NAFLD, portal hypertension, general cholestasis, such as in jaundice due to drugs or during pregnancy, intra- and extrahepatic cholestasis, such as hereditary forms of cholestasis, such as PFIC1, gall stones and choledocholithiasis, malignancy causing obstruction of the biliary tree, symptoms (scratching, pruritus) due to cholestasis/jaundice, chronic autoimmune liver disease leading to progressive cholestasis, and pruritus of cholestatic liver disease, duodenal ulcers, enteritis (radiation-, chemotherapy-, or infection-induced enteritis), diverticulitis, pouchitis, cholecystitis, and cholangitis. In some embodiments of any of the methods described herein, the inflammatory disease or condition that arises in a tissue originating from the endoderm is inflammation of the liver.

[0014] In some embodiments of any of the methods described herein, the immune modulator is released at a location in the large intestine of the subject. In some embodiments of any of the methods described herein, the location is in the proximal portion of the large intestine. In some embodiments of any of the methods described herein, the location is in the distal portion of the large intestine.

[0015] In some embodiments of any of the methods described herein, the immune modulator is released at a location in the ascending colon of the subject. In some embodiments of any of the methods described herein, the location is in the proximal portion of the ascending colon. In some embodiments of any of the methods described herein, the location is in the distal portion of the ascending colon.

[0016] In some embodiments of any of the methods described herein, the immune modulator is released at a location in the cecum of the subject. In some embodiments of any of the methods described herein, the location is in the proximal portion of the cecum. In some embodiments of any of the methods described herein, the location is in the distal portion of the cecum.

[0017] In some embodiments of any of the methods described herein, the immune modulator is released at a location in the sigmoid colon of the subject. In some embodiments of any of the methods described herein, the location is in the proximal portion of the sigmoid colon. In some embodiments of any of the methods described herein, the location is in the distal portion of the sigmoid colon. In some embodiments of any of the methods described herein, the immune modulator is released at a location in the transverse colon of the subject. In some embodiments of any of the methods described herein, the location is in the proximal portion of the transverse colon. In some embodiments of any of the methods described herein, the location is in the distal portion of the transverse colon.

[0018] In some embodiments of any of the methods described herein, the immune modulator is released at a location in the descending colon of the subject. In some embodiments of any of the methods described herein, the location is in the proximal portion of the descending colon. In some embodiments of any of the methods described herein, the location is in the distal portion of the descending colon.

[0019] In some embodiments of any of the methods described herein, the immune modulator is released at a location in the small intestine of the subject. In some embodiments of any of the methods described herein, the location is in the proximal portion of the small intestine. In some embodiments of any of the methods described herein, the location is in the distal portion of the small intestine.

[0020] In some embodiments of any of the methods described herein, the immune modulator is released at a location in the duodenum of the subject. In some embodiments of any of the methods described herein, the location is in the proximal portion of the duodenum. In some embodiments of any of the methods described herein, the location is in the distal portion of the duodenum.

[0021] In some embodiments of any of the methods described herein, the immune modulator is released at a location in the jejunum of the subject. In some embodiments of any of the methods described herein, the location is in the proximal portion of the jejunum. In some embodiments of any of the methods described herein, the location is in the distal portion of the jejunum.

[0022] In some embodiments of any of the methods described herein, the immune modulator is released at a location in the ileum of the subject. In some embodiments of any of the methods described herein, the location is in the proximal portion of the ileum. In some embodiments of any of the methods described herein, the location is in the distal portion of the ileum.

[0023] In some embodiments of any of the methods described herein, the location at which the immune modulator is released is 10 cm or less from an intended site of release. In some embodiments of any of the methods described herein, the location at which the immune modulator is released is 5 cm or less from an intended site of release. In some embodiments of any of the methods described herein, the location at which the immune modulator is released is 2 cm or less from an intended site of release.

[0024] In some embodiments of any of the methods described herein, the immune modulator is released by mucosal contact. In some embodiments of any of the methods described herein, the immune modulator is delivered to the location by a process that does not comprise systemic transport of the immune modulator.

[0025] Some embodiments of any of the methods described herein further include identifying an intended site of release of the immune modulator using a method that includes imaging of the gastrointestinal tract. In some embodiments of any of the methods described herein, the method includes identifying an intended site of release of the immune modulator, prior to administering the pharmaceutical composition. In some embodiments of any of the methods described herein, the method includes releasing the immune modulator substantially at the same time as identifying the intended site of release of the immune modulator.

[0026] In some embodiments of any of the methods described herein, the methods include (a) identifying a subject having an inflammatory disease or condition that arises in a tissue originating from the endoderm, and (b) evaluating the subject for suitability to treatment.

[0027] In some embodiments of any of the methods described herein, the releasing of the immune modulator is triggered by one or more of: a pH in the jejunum from 6.1 to 7.2, a pH in the mid small bowel from 7.0 to 7.8, a pH in the ileum from 7.0 to 8.0, a pH in the right colon from 5.7 to 7.0, a pH in the mid colon from 5.7 to 7.4, or a pH in the left colon from 6.3 to 7.7, such as 7.0.

[0028] In some embodiments of any of the methods described herein, the releasing of the immune modulator is not dependent on the pH at or in the vicinity of the location.

[0029] In some embodiments of any of the methods described herein, the releasing of the immune modulator is triggered by degradation of a release component located in the device. In some embodiments of any of the methods described herein, the releasing of the immune modulator is not triggered by degradation of a release component located in the device. In some embodiments of any of the methods described herein, the releasing of the immune modulator is not dependent on enzymatic activity at or in the vicinity of the location. In some embodiments of any of the methods described herein, the releasing of the immune modulator is not dependent on bacterial activity at or in the vicinity of the location. In some embodiments of any of the methods described herein, the composition includes a plurality of electrodes including a coating, and releasing the immune modulator is triggered by an electric signal by the electrodes resulting from the interaction of the coating with an intended site of release of the immune modulator. In some embodiments of any of the methods described herein, the release of the immune modulator is triggered by a remote electromagnetic signal. In some embodiments of any of the methods described herein, the release of the immune modulator is triggered by generation in the composition of a gas in an amount sufficient to expel the immune modulator. In some embodiments of any of the methods described herein, the release of the immune modulator is triggered by an electromagnetic signal generated within the device according to a pre-determined drug release profile.

[0030] In some embodiments of any of the methods described herein, the ingestible device includes an ingestible housing, wherein a reservoir storing the immune modulator is attached to the housing. Some embodiments of any of the methods described herein further include: detecting when the ingestible housing is proximate to an intended site of release, where releasing the immune modulator includes releasing the therapeutically effective amount of the immune modulator from the reservoir proximate the intended site of release in response to the detection. In some embodiments of any of the methods described herein, the detecting includes detecting via one or more sensors coupled to the ingestible housing. In some embodiments of any of the methods described herein, the one or more sensors include a plurality of coated electrodes and wherein detecting includes receiving an electric signal by one or more of the coated electrodes responsive to the one or more electrode contacting the respective intended site of release. In some embodiments of any of the methods described herein, the releasing includes opening one or more valves in fluid communication with the reservoir. In some embodiments of any of the methods described herein, the one or more valves is communicably coupled to a processor positioned in the housing, the processor communicably coupled to one or more sensors configured to detect the intended site of release. In some embodiments of any of the methods described herein, the releasing includes pumping the therapeutically effective amount of the immune modulator from the reservoir via pump positioned in the ingestible housing. In some embodiments of the methods described herein, the pump is communicably coupled to a processor positioned in the housing, the processor communicably coupled to one or more sensors configured to detect an intended site of release of the immune modulator. In some embodiments of any of the methods described herein, the therapeutically effective amount of the immune modulator is stored in the reservoir at a reservoir pressure higher than a pressure in the gastrointestinal tract of the subject.

[0031] Some embodiments of any of the methods described herein further include anchoring the ingestible housing at a location proximate to the intended site of release in response to the detection. In some embodiments of any of the methods described herein, the anchoring the ingestible housing includes one or more legs to extend from the ingestible housing.

[0032] In some embodiments of any of the methods described herein, the amount of the immune modulator that is administered is from about 1 mg to about 500 mg. In some embodiments of any of the methods described herein, the immune modulator is an antibody or an antigen-binding antibody fragment. In some embodiments of any of the methods described herein, the antibody is a humanized antibody.

[0033] In some embodiments, the subject is administered the dose of the immune modulator once a day. In some embodiments, the subject is administered the dose of the immune modulator once every two days.

[0034] In some embodiments of any of the methods described herein, the amount of the immune modulator is less than an amount that is effective when the immune modulator is administered systemically. In some embodiments of any of the methods described herein, the methods include administering (i) an amount of the immune modulator that is an induction dose. Some embodiments of any of the methods described herein further include (ii) administering an amount of the immune modulator that is a maintenance dose following the administration of the induction dose. In some embodiments of any of the methods described herein, the induction dose is administered once a day. In some embodiments of any of the methods described herein, the induction dose is administered once every two days. In some embodiments of any of the methods described herein, the induction dose is administered once every three days. In some embodiments of any of the methods described herein, the induction dose is administered once a week. In some embodiments of any of the methods described herein, step (ii) is repeated one or more times. In some embodiments of any of the methods described herein, step (ii) is repeated once a day over a period of about 6-8 weeks. In some embodiments of any of the methods described herein, step (ii) is repeated once every three days over a period of about 6-8 weeks. In some embodiments of any of the methods described herein, step (ii) is repeated once a week over a period of about 6-8 weeks.

[0035] In some embodiments of any of the methods described herein, the induction dose is equal to the maintenance dose. In some embodiments of any of the methods described herein, the induction dose is greater than the maintenance dose. In some embodiments of any of the methods described herein, the induction dose is 5 times greater than the maintenance dose. In some embodiments of any of the methods described herein, the induction dose is 2 times greater than the maintenance dose.

[0036] In some embodiments of any of the methods described herein, the method includes releasing the immune modulator at the location in the gastrointestinal tract as a single bolus. In some embodiments of any of the methods described herein, the method includes releasing the immune modulator at the location in the gastrointestinal tract as more than one bolus. In some embodiments of any of the methods described herein, the method includes delivering the immune modulator at the location in the gastrointestinal tract in a continuous manner. In some embodiments of any of the methods described herein, the method includes delivering the immune modulator at the location in the gastrointestinal tract over a time period of 20 or more minutes. In some embodiments of any of the methods described herein, the method does not include delivering an immune modulator rectally to the subject. In some embodiments of any of the methods described herein, the method does not include delivering an immune modulator via an enema to the subject. In some embodiments of any of the methods described herein, the method does not include delivering an immune modulator via suppository to the subject. In some embodiments of any of the methods described herein, the method does not include delivering an immune modulator via instillation to the rectum of the subject. In some embodiments of any of the methods described herein, the method does not include surgical implantation.

[0037] In some embodiments of any of the methods described herein, the immune modulator is an IL-12/IL-23 inhibitor. In some embodiments of any of the methods described herein, the immune modulator is a TNFα inhibitor. In some embodiments of any of the methods described herein, the immune modulator is a IL-6 receptor inhibitor. In some embodiments of any of the methods described herein, the immune modulator is a CD40/CD40L inhibitor. In some embodiments of any of the methods described herein, the immune modulator is a IL-1 inhibitor. In some embodiments of any of the methods described herein, the immune modulator is a PDE4 inhibitor.

[0038] In some embodiments of any of the methods described herein, the composition is an autonomous device. In some embodiments of any of the methods described herein, the composition includes a mechanism capable of releasing the immune modulator. In some embodiments of any of the methods described herein, the composition includes a tissue anchoring mechanism for anchoring the composition to the location. In some embodiments of any of the methods described herein, the tissue anchoring mechanism is capable of activation for anchoring to the location. In some embodiments of any of the methods described herein, the tissue anchoring mechanism includes an osmotically-driven sucker. In some embodiments of any of the methods described herein, the tissue anchoring mechanism includes a connector operable to anchor the composition to the location. In some embodiments of any of the methods described herein, the connector is operable to anchor the composition to the location using an adhesive, negative pressure and/or fastener. In some embodiments of any of the methods described herein, the reservoir is an anchorable reservoir.

[0039] In some embodiments of any of the methods described herein, the pharmaceutical composition is an ingestible device, that includes: a housing; a reservoir located within the housing and containing the immune modulator, a mechanism for releasing the immune modulator from the reservoir; and an exit valve configured to allow the immune modulator to be released out of the housing from the reservoir. In some embodiments of any of the methods described herein, the ingestible device further includes: an electronic component located within the housing; and a gas generating cell located within the housing and adjacent to the electronic component, where the electronic component is configured to activate the gas generating cell to generate gas. In some embodiments of any of the methods described herein, the ingestible device further includes: a safety device placed within or attached to the housing, where the safety device is configured to relieve an internal pressure within the housing when the internal pressure exceeds a threshold level.

[0040] In some embodiments of any of the methods described herein, the pharmaceutical composition is an ingestible device, that includes: a housing defined by a first end, a second end substantially opposite from the first end, and a wall extending longitudinally from the first end to the second end; an electronic component located within the housing; a gas generating cell located within the housing and adjacent to the electronic component, where the electronic component is configured to activate the gas generating cell to generate gas; a reservoir located within the housing, where the reservoir stores a dispensable substance and a first end of the reservoir is attached to the first end of the housing; an exit valve located at the first end of the housing, where the exit valve is configured to allow the dispensable substance to be released out of the first end of the housing from the reservoir; and a safety device placed within or attached to the housing, where the safety device is configured to relieve an internal pressure within the housing when the internal pressure exceeds a threshold level.

[0041] In some embodiments of any of the methods described herein, the pharmaceutical composition is an ingestible device, that includes: a housing defined by a first end, a second end substantially opposite from the first end, and a wall extending longitudinally from the first end to the second end; an electronic component located within the housing, a gas generating cell located within the housing and adjacent to the electronic component, where the electronic component is configured to activate the gas generating cell to generate gas; a reservoir located within the housing, where the reservoir stores a dispensable substance and a first end of the reservoir is attached to the first end of the housing; an injection device located at the first end of the housing, where the jet injection device is configured to inject the dispensable substance out of the housing from the reservoir; and a safety device placed within or attached to the housing, where the safety device is configured to relieve an internal pressure within the housing.

[0042] In some embodiments of any of the methods described herein, the pharmaceutical composition is an ingestible device, that includes: a housing defined by a first end, a second end substantially opposite from the first end, and a wall extending longitudinally from the first end to the second end; an optical sensing unit located on a side of the housing, where the optical sensing unit is configured to detect a reflectance from an environment external to the housing; an electronic component located within the housing; a gas generating cell located within the housing and adjacent to the electronic component, where the electronic component is configured to activate the gas generating cell to generate gas in response to identifying a location of the ingestible device based on the reflectance; a reservoir located within the housing, where the reservoir stores a dispensable substance and a first end of the reservoir is attached to the first end of the housing; a membrane in contact with the gas generating cell and configured to move or deform into the reservoir by a pressure generated by the gas generating cell; and a dispensing outlet placed at the first end of the housing, where the dispensing outlet is configured to deliver the dispensable substance out of the housing from the reservoir.

[0043] In some embodiments, provided herein is a method of treating a disease as disclosed herein, comprising:

[0044] administering to the subject a pharmaceutical formulation that comprises a therapeutic agent as disclosed herein,

[0045] wherein the pharmaceutical formulation is released at a location in the gastrointestinal tract of the subject, such as a location that is proximate to one or more sites of disease.

[0046] In some embodiments, the pharmaceutical formulation is administered in an ingestible device. In some embodiments, the pharmaceutical formulation is released from an ingestible device. In some embodiments, the ingestible device comprises a housing, a reservoir containing the pharmaceutical formulation, and a release mechanism for releasing the pharmaceutical formulation from the device,

[0047] wherein the reservoir is releasably or permanently attached to the exterior of the housing or internal to the housing.

[0048] In some embodiments, provided herein is a method of treating a disease as disclosed herein, comprising:

[0049] administering to the subject an ingestible device comprising a housing, a reservoir containing a pharmaceutical formulation, and a release mechanism for releasing the pharmaceutical formulation from the device,

[0050] wherein the reservoir is releasably or permanently attached to the exterior of the housing or internal to the housing;

[0051] wherein the pharmaceutical formulation comprises a therapeutic agent as disclosed herein, and

[0052] the ingestible device releases the pharmaceutical formulation at a location in the gastrointestinal tract of the subject, such as a location that is proximate to one or more sites of disease.

[0053] In some embodiments, the housing is non-biodegradable in the GI tract. In some embodiments, the release of the formulation is triggered autonomously. In some embodiments, the device is programmed to release the formulation with one or more release profiles that may be the same or different at one or more locations. In some embodiments, the device is programmed to release the formulation at a location proximate to one or more sites of disease. In some embodiments, the location of one or more sites of disease is predetermined.

[0054] In some embodiments, the reservoir is made of a material that allows the formulation to leave the reservoir, such as a biodegradable material.

[0055] In some embodiments, the release of the formulation is triggered by a pre-programmed algorithm. In some embodiments, the release of the formulation is triggered by data from a sensor or detector to identify the location of the device. In some more particular embodiments, the data is not based solely on a physiological parameter (such as pH, temperature, and/or transit time).

[0056] In some embodiments, the device comprises a detector configured to detect light reflectance from an environment external to the housing. In some more particular embodiments, the release is triggered autonomously or based on the detected reflectance.

[0057] In some embodiments, the device releases the formulation at substantially the same time as one or more sites of disease are detected. In some embodiments, the one or more sites of disease are detected by the device (e.g., by imaging the GI tract).

[0058] In some embodiments, the release mechanism is an actuation system. In some embodiments, the release mechanism is a chemical actuation system. In some embodiments, the release mechanism is a mechanical actuation system. In some embodiments, the release mechanism is an electrical actuation system. In some embodiments, the actuation system comprises a pump and releasing the formulation comprises pumping the formulation out of the reservoir. In some embodiments, the actuation system comprises a gas generating cell. In some embodiments, the device further comprises an anchoring mechanism. In some embodiments, the formulation comprises a therapeutically effective amount of the therapeutic agent as disclosed herein. In some embodiments, the formulation comprises a human equivalent dose (HED) of the therapeutic agent as disclosed herein.

[0059] In some embodiments, the device is a device capable of releasing a solid therapeutic agent as disclosed herein or a solid formulation comprising the therapeutic agent as disclosed herein. In some embodiments, the device is a device capable of releasing a liquid therapeutic agent as disclosed herein or a liquid formulation comprising the therapeutic agent as disclosed herein. Accordingly, in some embodiments of the methods herein, the pharmaceutical formulation release from the device is a solid formulation. Accordingly, in some embodiments of the methods herein, the pharmaceutical formulation release from the device is a liquid formulation.

[0060] The devices disclosed herein are capable of releasing a therapeutic agent as disclosed herein or a formulation comprising the therapeutic agent as disclosed herein irrespective of the particular type of therapeutic agent as disclosed herein. For example, the therapeutic agent as disclosed herein may be a small molecule, a biological, a nucleic acid, an antibody, a fusion protein, and so on.

[0061] In some embodiments, provided herein is a method of releasing a therapeutic agent as disclosed herein into the gastrointestinal tract of a subject for treating one or more sites of disease within the gastrointestinal tract, the method comprising:

[0062] administering to the subject a therapeutically effective amount of the therapeutic agent as disclosed herein housed in an ingestible device, wherein the ingestible device comprises

[0063] a detector configured to detect the presence of the one or more sites of disease, and

[0064] a controller or processor configured to trigger the release of the therapeutic agent as disclosed herein proximate to the one or more sites of disease in response to the detector detecting the presence of the one or more sites of disease.

[0065] In some embodiments, provided herein is a method of releasing a therapeutic agent as disclosed herein into the gastrointestinal tract of a subject for treating one or more pre-determined sites of disease within the gastrointestinal tract, the method comprising:

[0066] administering to the subject a therapeutically effective amount of the therapeutic agent as disclosed herein contained in an ingestible device, wherein the ingestible device comprises

[0067] a detector configured to detect the location of the device within the gastrointestinal tract, and

[0068] a controller or processor configured to trigger the release of the therapeutic agent as disclosed herein proximate to the one or more predetermined sites of disease in response to the detector detecting a location of the device that corresponds to the location of the one or more pre-determined sites of disease.

[0069] In some embodiments, provided herein is a method of releasing a therapeutic agent as disclosed herein into the gastrointestinal tract of a subject for treating one or more sites of disease within the gastrointestinal tract, the method comprising:

[0070] administering to the subject a therapeutically effective amount of the therapeutic agent as disclosed herein contained in an ingestible device;

[0071] receiving at an external receiver from the device a signal transmitting environmental data;

[0072] assessing the environmental data to confirm the presence of the one or more sites of disease; and

[0073] when the presence of the one or more sites of disease is confirmed, sending from an external transmitter to the device a signal triggering the release of the therapeutic agent as disclosed herein proximate to the one or more sites of disease.

[0074] In some embodiments, provided herein is a method of releasing a therapeutic agent as disclosed herein into the gastrointestinal tract of a subject for treating one or more sites of disease within the gastrointestinal tract, the method comprising:

[0075] administering to the subject a therapeutically effective amount of the therapeutic agent as disclosed herein contained in an ingestible device;

[0076] receiving at an external receiver from the device a signal transmitting environmental or optical data;

[0077] assessing the environmental or optical data to confirm the location of the device within the gastrointestinal tract; and

[0078] when the location of the device is confirmed, sending from an external transmitter to the device a signal triggering the release of the therapeutic agent as disclosed herein proximate to the one or more sites of disease.

[0079] In some embodiments of any of the methods described herein, the pharmaceutical composition is an ingestible device as disclosed in U.S. Patent Application Ser. No. 62/385,553, incorporated by reference herein in its entirety. In some embodiments of any of the methods described herein, the pharmaceutical composition is an ingestible device that includes a localization mechanism as disclosed in international patent application PCT/US2015/052500, incorporated by reference herein in its entirety. In some embodiments of any of the methods described herein, the pharmaceutical composition is not a dart-like dosage form.

[0080] Also provided herein are methods of treating an inflammatory disease or condition that arises in a tissue originating from the endoderm of a subject, that include: releasing an immune modulator at a location in the large intestine of the subject, where the method includes administering endoscopically to the subject a therapeutically effective amount of the immune modulator, where the method does not include releasing more than 20% of the immune modulator at a location that is not an intended site of release.

[0081] Also provided herein are methods of treating a disease or condition that arises in a tissue originating from the endoderm in a subject, that include: releasing an immune modulator at a location in the proximal portion of the large intestine of the subject, where the method includes administering endoscopically to the subject a pharmaceutical composition including a therapeutically effective amount of the immune modulator, where the pharmaceutical composition is an ingestible device.

[0082] In some embodiments of any of the methods described herein, the method does not include releasing more than 20% of the immune modulator at a location that is not proximate to an intended site of release. In some embodiments of any of the methods described herein, the method does not include releasing more than 10% of the immune modulator at a location that is not proximate to an intended site of release. In some embodiments of any of the methods described herein, the method provides a concentration of the immune modulator at a location that is an intended site of release that is 2-100 times greater than at a location that is not the intended site of release. In some embodiments of any of the methods described herein, the method provides a concentration of the immune modulator in the plasma of the subject that is less than 3 μg/mL. In some embodiments of any of the methods described herein, the method provides a concentration of the immune modulator in the plasma of the subject that is less than 0.3 μg/mL. In some embodiments of any of the methods described herein, the method provides a concentration of the immune modulator in the plasma of the subject that is less than 0.01 μg/mL. In some embodiments of any of the methods described herein, the method provides a C₂₄ value of the immune modulator in the plasma of the subject that is less than 3 μg/mL. In some embodiments of any of the methods described herein, the method provides a C₂₄ value of the immune modulator in the plasma of the subject that is less than 0.3 μg/mL. In some embodiments of any of the methods described herein, the method provides a C₂₄ value of the immune modulator in the plasma of the subject that is less than 0.01 μg/mL.

[0083] In some embodiments of any of the methods described herein, the composition does not include an enteric coating. In some embodiments of any of the methods described herein, the immune modulator is not a cyclic peptide. In some embodiments of any of the methods described herein, the immune modulator is present in a pharmaceutical formulation within the device. In some embodiments of any of the methods described herein, the formulation is a solution of the immune modulator in a liquid medium. In some embodiments of any of the methods described herein, the formulation is a suspension of the immune modulator in a liquid medium.

[0084] In some embodiments of any of the methods described herein, the tissue originating from the endoderm is selected from the group of: the stomach, the colon, the liver, the pancreas, the urinary bladder, the epithelial parts of the trachea, the lungs, the pharynx, the thyroid, the parathyroid, the intestines, and the gallbladder. In some embodiments of any of the methods described herein, the inflammatory disease or condition that arises in a tissue originating from the endoderm is selected from the group of: gastritis, Celiac disease, hepatitis, alcoholic lever disease, fatty liver disease (hepatic steatosis), non-alcoholic fatty liver disease (NASH), cirrhosis, primary schlerosing cholangitis, pancreatitis, insterstitial cystitits, asthma, chronic obstructic pulmonary disease, pulmonary fibrosis, pharyngitis, thyroiditis, hyperthyroidism, parathyroiditis, nephritis, Hashimoto's disease, Addison's disease, Graves' disease, Sjögren syndrome, type 1 diabetes, pelvic inflammatory disease, auditory canal inflammation, tinnitus, vestibular neuritis, otitis media, auditory canal inflammation, tracheitis, cholestatic liver disease, primary biliary schlerosis, liver parenchyma, an inherited metabolic disorder of the liver, Byler syndrome, cerebrotendinous, xanthomatosis, Zellweger's syndrome, neonatal hepatitis, cystic fibrosis, ALGS (Alagilles syndrome), PFIC (progressive familial intrahepatic cholestasis), autoimmune hepatitis, primary biliary cirrhosis (PBC), liver fibrosis, NAFLD, portal hypertension, general cholestasis, such as in jaundice due to drugs or during pregnancy, intra- and extrahepatic cholestasis, such as hereditary forms of cholestasis, such as PFIC1, gall stones and choledocholithiasis, malignancy causing obstruction of the biliary tree, symptoms (scratching, pruritus) due to cholestasis/jaundice, chronic autoimmune liver disease leading to progressive cholestasis, and pruritus of cholestatic liver disease, duodenal ulcers, enteritis (radiation-, chemotherapy-, or infection-induced enteritis), diverticulitis, pouchitis, cholecystitis, and cholangitis. In some embodiments of any of the methods described herein, the inflammatory disease or condition that arises in a tissue originating from the endoderm is inflammation of the liver.

[0085] In some embodiments of any of the methods described herein, the immune modulator is released at a location in the proximal portion of the ascending colon. In some embodiments of any of the methods described herein, the immune modulator is released at a location in the proximal portion of the cecum. In some embodiments of any of the methods described herein, the immune modulator is released at a location in the proximal portion of the sigmoid colon. In some embodiments of any of the methods described herein, the immune modulator is released at a location in the proximal portion of the transverse colon. In some embodiments of any of the methods described herein, the immune modulator is released at a location in the proximal portion of the descending colon. In some embodiments of any of the methods described herein, the method includes administering to the subject a reservoir including the therapeutically effective amount of the immune modulator, where the reservoir is connected to the endoscope.

[0086] Some embodiments of any of the methods described herein further include administering a second agent orally, intravenously or subcutaneously, where the second agent is the same immune modulator; a different immune modulator; or an agent having a different biological target from the immune modulator, where the second agent is an agent suitable for treating an inflammatory disease or condition that arises in a tissue originating from the endoderm. In some embodiments of any of the methods described herein, the immune modulator is administered prior to the second agent. In some embodiments of any of the methods described herein, the immune modulator is administered after the second agent. In some embodiments of any of the methods described herein, the immune modulator and the second agent are administered substantially at the same time. In some embodiments of any of the methods described herein, the second agent is administered intravenously. In some embodiments of any of the methods described herein, the second agent is administered subcutaneously. In some embodiments of any of the methods described herein, the amount of the second agent is less than the amount of the second agent when the immune modulator and the second agent are both administered systemically. In some embodiments of any of the methods described herein, the second agent is another immune modulator. In some embodiments of any of the methods described herein, the method does not include administering a second agent.

[0087] In some embodiments of any of the methods described herein, the method includes identifying an intended site of release prior to endoscopic administration. In some embodiments of any of the methods described herein, the method includes identifying an intended site of release substantially at the same time as releasing the immune modulator. In some embodiments of any of the methods described herein, the method includes monitoring the progress of the disease. In some embodiments of any of the methods described herein, the method does not include administering an immune modulator with a spray catheter. In some embodiments of any of the methods described herein, the method includes administering an immune modulator with a spray catheter.

[0088] Also provided herein are methods of treating an inflammatory disease or condition that arises in a tissue arising from the endoderm in a subject, that include: releasing an immune modulator at a location in the gastrointestinal tract of the subject that is proximate to an intended site of release, where the methods include administering to the subject a pharmaceutical composition including a therapeutically effective amount of the immune modulator the method including one or more of the following steps: (a) identifying a subject having a disease or condition that arises in a tissue originating from the endoderm; (b) determination of the severity of the disease; (c) determination of the location of the disease; (d) evaluating the subject for suitability to treatment; (e) administration of an induction dose of the immune modulator; (f) monitoring the progress of the disease; and/or (g) optionally repeating steps (e) and (f) one or more times.

[0089] In some embodiments of any of the methods described herein, the pharmaceutical composition is an ingestible device and the method includes administering orally to the subject the pharmaceutical composition. In some embodiments of any of the methods described herein, the method includes administering one or more maintenance doses following administration of the induction dose in step (e). In some embodiments of any of the methods described herein, the induction dose is a dose of the immune modulator administered in an ingestible device. In some embodiments of any of the methods described herein, the maintenance dose is a dose of the immune modulator administered in an ingestible device as disclosed herein. In some embodiments of any of the methods described herein, the maintenance dose is a dose of the immune modulator delivered systemically. In some embodiments of any of the methods described herein, the induction dose is a dose of the immune modulator delivered systemically. In some embodiments of any of the methods described herein, the maintenance dose is a dose of the immune modulator administered in an ingestible device. In some embodiments of any of the methods described herein, the induction dose is a dose of a second agent as delivered systemically. In some embodiments of any of the methods described herein, the maintenance dose is a dose of the immune modulator administered in an ingestible device.

[0090] In some embodiments of any of the methods described herein, wherein the immune modulator is selected from the group of: IL-12/IL-23 inhibitors, TNFα inhibitors, IL-6 receptor inhibitors, CD40/CD40L inhibitors, IL-1 inhibitors, IL-13 inhibitors, IL-10 receptor agonists, and integrin inhibitors. In some embodiments of any of the methods described herein, the immune modulator is a PDE4 inhibitor.

[0091] Also provided herein are immune modulator delivery apparatuses that include: an ingestible housing including a reservoir having a pharmaceutical composition including a therapeutically effective amount of the immune modulator stored therein; a detector coupled to the ingestible housing, the detector configured to detect when the ingestible housing is proximate to a respective intended site of release; a valve system in fluid communication with the reservoir system; and a controller communicably coupled to the valve system and the detector, the controller configured to cause the valve system to open in response to the detector detecting that the ingestible housing is proximate to the respective intended site of release so as to release the therapeutically effective amount of the immune modulator at the respective intended site of release. Some embodiments of any of the apparatuses described herein further include a pump positioned in the ingestible housing, the pump configured to pump the therapeutically effective amount of the immune modulator from the reservoir in response to activation of the pump by the controller responsive to detection by the detector of the ingestible housing being proximate to the intended site of release. In some embodiments of any of the apparatuses described herein, the controller is configured to cause the pump to pump the therapeutically effective amount of the immune modulator from the reservoir according to the following protocol. In some embodiments of any of the apparatuses described herein, the valve system includes a dissolvable coating. In some embodiments of any of the apparatuses described herein, the valve system includes one or more doors configured for actuation by at least one of sliding, pivoting, and rotating. In some embodiments of any of the apparatuses described herein, the valve system includes an electrostatic shield. In some embodiments of any of the apparatuses described herein, the reservoir includes a pressurized cell.

[0092] Some embodiments of any of the apparatuses described herein further include at least one actuatable anchor configured to retain the ingestible housing at the respective intended site of release upon actuation. In some embodiments of any of the apparatuses described herein, the actuatable anchor is retractable.

[0093] Also provided herein are compositions that include a therapeutically effective amount of any of the immune modulators described herein, where the composition is capable of releasing the immune modulator at a location in the gastrointestinal tract of the subject. In some embodiments of any of the compositions described herein, the composition includes a tissue anchoring mechanism for anchoring the composition to the location. In some embodiments of any of the compositions described herein, the tissue anchoring mechanism is capable of anchoring for anchoring to the location. In some embodiments of any of the compositions described herein, the tissue anchoring mechanism includes an osmotically-driven sucker. In some embodiments of any of the compositions described herein, the tissue anchoring mechanism comprises a connector operable to anchor the composition to the location. In some embodiments of any of the compositions described herein, the connector is operable to anchor the composition to the location using an adhesive, negative pressure and/or fastener.

[0094] Also provided herein is an immune modulator for use in a method of treating an inflammatory disease or condition that arises in a tissue originating from the endoderm in a subject, where the method includes orally administering to the subject an ingestible device loaded with the immune modulator, wherein the immune modulator is released by the device at a location in the gastrointestinal tract of the subject that is proximate to an intended site of release of the immune modulator. In some embodiments of an immune modulator for use described herein, the immune modulator is contained in a reservoir suitable for attachment to a device housing, and wherein the method includes attaching the reservoir to the device housing to form the ingestible device, prior to orally administering the ingestible device to the subject.

[0095] Also provided herein is an attachable reservoir containing an immune modulator for use in a method of treating an inflammatory disease or condition that arises in a tissue originating from the endoderm, where the method includes attaching the reservoir to a device housing to form an ingestible device and orally administering the ingestible device to a subject, where the immune modulator is released by device at a location in the gastrointestinal tract of the subject that is proximate to the intended site of release.

[0096] Also provided herein is a composition including or consisting of an ingestible device loaded with a therapeutically effective amount of an immune modulator, for use in a method of treatment, wherein the method includes orally administering the composition to the subject, wherein the immune modulator is released by the device at a location in the gastrointestinal tract of the subject that is proximate to an intended site of release.

[0097] In some embodiments of any of the immune modulators for use described herein, any of the attachable reservoirs described herein, or the compositions for use described herein, the intended site of release has been pre-determined. In some embodiments of any of the immune modulators for use described herein, any of the attachable reservoirs described herein, or any of the compositions for use described herein, the ingestible device further includes an environmental sensor and the method further includes using the environmental sensor to identify the location of the intended site of release. In some embodiments of any of the immune modulators for use, any of the attachable reservoirs described herein, or any of the compositions for use described herein, the environmental sensor is an imaging sensor and the method further includes imaging the gastrointestinal tract to identify the intended site of release. In some embodiments of any of the immune modulators for use described herein, any of the attachable reservoirs described herein, or any of the compositions for use described herein, the imaging detects an intended site of release. In some embodiments of any of the immune modulators for use, any of the attachable reservoirs described herein, or any of the compositions for use described herein, the inflammatory disease or condition that arises in a tissue originating from the endoderm is selected from the group of: gastritis, Celiac disease, hepatitis, alcoholic liver disease, fatty liver disease (hepatic steatosis), non-alcoholic fatty liver disease (NASH), cirrhosis, primary schlerosing cholangitis, pancreatitis, insterstitial cystitits, asthma, chronic obstructic pulmonary disease, pulmonary fibrosis, pharyngitis, thyroiditis, hyperthyroidism, parathyroiditis, nephritis, Hashimoto's disease, Addison's disease, Graves' disease, Sjögren syndrome, type 1 diabetes, pelvic inflammatory disease, auditory canal inflammation, tinnitus, vestibular neuritis, otitis media, auditory canal inflammation, tracheitis, cholestatic liver disease, primary biliary schlerosis, liver parenchyma, an inherited metabolic disorder of the liver, Byler syndrome, cerebrotendinous, xanthomatosis, Zellweger's syndrome, neonatal hepatitis, cystic fibrosis, ALGS (Alagilles syndrome), PFIC (progressive familial intrahepatic cholestasis), autoimmune hepatitis, primary biliary cirrhosis (PBC), liver fibrosis, NAFLD, portal hypertension, general cholestasis, such as in jaundice due to drugs or during pregnancy, intra- and extrahepatic cholestasis, such as hereditary forms of cholestasis, such as PFIC1, gall stones and choledocholithiasis, malignancy causing obstruction of the biliary tree, symptoms (scratching, pruritus) due to cholestasis/jaundice, chronic autoimmune liver disease leading to progressive cholestasis, and pruritus of cholestatic liver disease, duodenal ulcers, enteritis (radiation-, chemotherapy-, or infection-induced enteritis), diverticulitis, pouchitis, cholecystitis, and cholangitis.

[0098] In some embodiments of any of the immune modulators for use, any of the attachable reservoirs described herein, or any of the compositions for use described herein, the inflammatory disease or condition that arises in a tissue originating from the endoderm is a liver disease or disorder selected from the group of: fibrosis, cirrhosis, alcoholic lever disease, fatty liver disease (hepatic steatosis), non-alcoholic fatty liver disease (NASH), cholestatic liver disease, liver parenchyma, an inherited metabolic disorder of the liver, PFIC (progressive familial intrahepatic cholestasis), autoimmune hepatitis, primary biliary cirrhosis (PBC), NAFLD, chronic autoimmune liver disease leading to progressive cholestasis, pruritus of cholestatic liver disease, inflammation of the liver, and liver fibrosis.

[0099] In some embodiments of any of the immune modulators for use, any of the attachable reservoirs described herein, or any of the compositions for use described herein, the disease or condition that arises in a tissue originating from the endoderm is a disease or condition related to the gut-brain axis selected from the group consisting of multiple sclerosis, Parkinson's disease, mild cognitive impairment, Alzheimer's, disease, encephalitis, and hepatic encephalopathy.

[0100] Also provided herein are ingestible devices loaded with a therapeutically effective amount of an immune modulator, where the device is controllable to release the immune modulator at a location in the gastrointestinal tract of the subject that is proximate to an intended site of release. Also provided herein are any of the devices described herein for use in a method of treatment of the human or animal body.

[0101] In some embodiments of any of the immune modulators for use described herein, any of the attachable reservoirs described herein, or any of the devices described herein, wherein the ingestible device includes: a housing defined by a first end, a second end substantially opposite from the first end, and a wall extending longitudinally from the first end to the second end; a reservoir located within the housing and containing the immune modulator, where a first end of the reservoir is connected to the first end of the housing; a mechanism for releasing the immune modulator from the reservoir; and an exit value configured to allow the immune modulator to be released out of the housing from the reservoir.

[0102] In some embodiments of any of the immune modulators for use described herein, any of the attachable reservoirs described herein, or any of the devices described herein, the ingestible device includes: an ingestible housing including a reservoir compartment having a therapeutically effective amount of the immune modulator stored therein; a release mechanism having a closed state which retains the immune modulator in the reservoir and an open state which releases the immune modulator the reservoir to the exterior of the device; and an actuator which changes the state of the release mechanism from the closed to the open state.

[0103] In some embodiments of any of the immune modulators for use described herein, any of the attachable reservoirs described herein, or any of the devices described herein, the ingestible device further comprises an environmental sensor for detecting the location of the device in the gut. In some embodiments of any of the immune modulators for use described herein, any of the compositions for use described herein, or any of the devices described herein, where the ingestible device further includes a communication system for transmitting data from the environmental sensor to an external receiver. In some embodiments of any of the immune modulators for use described herein, any of the attachable reservoirs described herein, any of the compositions for use described herein, or any of the devices described herein, the ingestible device further includes a processor or controller which is coupled to the environmental sensor and to the actuator and which triggers the actuator to cause the release mechanism to transition from its closed state to its open state when it is determined that the device is in the presence of the intended site of release and/or is in a location in the gut that has been predetermined to be proximal to the intended site of release.

[0104] In some embodiments of any of the immune modulators for use described herein, any of the attachable reservoirs described herein, any of the compositions for use described herein, or any of the devices described herein, the communication system further includes means for receiving a signal from an external transmitter, and where the actuator is adapted to be triggered in response to the signal.

[0105] In some embodiments of any of the immune modulators for use described herein, any of the attachable reservoirs described herein, any of the compositions for use described herein, or any of the devices described herein, the ingestible device further includes a communication system for transmitting localization data to an external receiver.

[0106] In some embodiments of any of the immune modulators for use described herein, any of the attachable reservoirs described herein, any of the compositions for use described herein, or any of the devices described herein, the ingestible device further includes a communication system for transmitting localization data to an external receiver and for receiving a signal from an external transmitter; where the actuator is adapted to be triggered in response to the signal. In some embodiments of any of the immune modulators for use described herein, any of the attachable reservoir compartments for use described herein, any of the compositions for use described herein, or any of the devices described herein, the ingestible device further includes a deployable anchoring system and an actuator for deploying the anchoring system, where the anchoring system is capable of anchoring or attaching the ingestible device to the subject's tissue.

[0107] In some embodiments of any of the methods described herein, the subject has previously been identified as having an inflammatory disease or condition that arises in a tissue originating from the endoderm.

[0108] Aspects and embodiments as described herein are intended to be freely combinable. For example, any details or embodiments described herein for methods of treatment apply equally to an agent, composition or ingestible device for use in said treatment. Any details or embodiments described for a device apply equally to methods of treatment using the device, or to an agent or composition for use in a method of treatment involving the device.

### BRIEF DESCRIPTION OF THE DRAWINGS

[0109] FIG. 1 is a view of an example embodiment of an ingestible device, in accordance with some embodiments of the disclosure.

[0110] FIG. 2 is an exploded view of the ingestible device of FIG. 1, in accordance with some embodiments of the disclosure.

[0111] FIG. 3 is a diagram of an ingestible device during an example transit through a GI tract, in accordance with some embodiments of the disclosure.

[0112] FIG. 4 is a diagram of an ingestible device during an example transit through a jejunum, in accordance with some embodiments of the disclosure.

[0113] FIG. 5 is a flowchart of illustrative steps for determining a location of an ingestible device as it transits through a GI tract, in accordance with some embodiments of the disclosure.

[0114] FIG. 6 is a flowchart of illustrative steps for detecting transitions from a stomach to a duodenum and from a duodenum back to a stomach, which may be used when determining a location of an ingestible device as it transits through a GI tract, in accordance with some embodiments of the disclosure.

[0115] FIG. 7 is a plot illustrating data collected during an example operation of an ingestible device, which may be used when determining a location of an ingestible device as it transits through a GI tract, in accordance with some embodiments of the disclosure.

[0116] FIG. 8 is another plot illustrating data collected during an example operation of an ingestible device, which may be used when determining a location of an ingestible device as it transits through a GI tract, in accordance with some embodiments of the disclosure.

[0117] FIG. 9 is a flowchart of illustrative steps for detecting a transition from a duodenum to a jejunum, which may be used when determining a location of an ingestible device as it transits through a GI tract, in accordance with some embodiments of the disclosure.

[0118] FIG. 10 is a plot illustrating data collected during an example operation of an ingestible device, which may be used when detecting a transition from a duodenum to a jejunum, in accordance with some embodiments of the disclosure.

[0119] FIG. 11 is a plot illustrating muscle contractions detected by an ingestible device over time, which may be used when determining a location of an ingestible device as it transits through a GI tract, in accordance with some embodiments of the disclosure.

[0120] FIG. 12 is a flowchart of illustrative steps for detecting a transition from a jejunum to an ileum, which may be used when determining a location of an ingestible device as it transits through a GI tract, in accordance with some embodiments of the disclosure.

[0121] FIG. 13 is a flowchart of illustrative steps for detecting a transition from a jejunum to an ileum, which may be used when determining a location of an ingestible device as it transits through a GI tract, in accordance with some embodiments of the disclosure.

[0122] FIG. 14 is a flowchart of illustrative steps for detecting a transition from an ileum to a cecum, which may be used when determining a location of an ingestible device as it transits through a GI tract, in accordance with some embodiments of the disclosure.

[0123] FIG. 15 is a flowchart of illustrative steps for detecting a transition from a cecum to a colon, which may be used when determining a location of an ingestible device as it transits through a GI tract, in accordance with some embodiments of the disclosure.

[0124] FIG. 16 illustrates an ingestible device for delivering a substance in the GI tract.

[0125] FIG. 17 illustrates aspects of a mechanism for an ingestible device with a gas generating cell configured to generate a gas to dispense a substance.

[0126] FIG. 18 illustrates an ingestible device having a piston to push for drug delivery.

[0127] FIG. 19 illustrates an ingestible device having a bellow structure for a storage reservoir of dispensable substances.

[0128] FIG. 20 illustrates an ingestible device having a flexible diaphragm to deform for drug delivery.

[0129] FIG. 21 shows an illustrative embodiment of an ingestible device with multiple openings in the housing.

[0130] FIG. 22 shows a highly cross-section of an ingestible device including a valve system and a sampling system.

[0131] FIG. 23 illustrates a valve system.

[0132] FIGS. 24A and 24B illustrate a portion of a two-stage valve system in its first and second stages, respectively.

[0133] FIGS. 25A and 25B illustrate a portion of a two-stage valve system in its first and second stages, respectively.

[0134] FIGS. 26A and 26B illustrate a portion of a two-stage valve system in its first and second stages, respectively.

[0135] FIG. 27 illustrates a more detailed view of an ingestible device including a valve system and a sampling system.

[0136] FIG. 28 illustrates a portion of an ingestible device including a sampling system and a two-stage valve system in its second stage.

[0137] FIG. 29 is a highly schematic illustrate of an ingestible device.

[0138] FIG. 30 is a graph shiwng the percentage (%) change in body weight at day 14 (±SEM) for DSS mice treated with anti-IL-12 p40 antibody intraperitoneally (10 mg/kg) every third day (Q3D) or intracecally (10 mg/kg or 1 mg/kg) daily (QD), when compared to mice treated with anti-IL-12 p40 antibody intraperitoneally (10 mg/kg) every third day (Q3D) and vehicle control (Vehicle). Mann-Whitney's U-test and Student's t-test were used for statistical analysis on non-Gaussian and Gaussian data respectively. A value of p<0.05 was considered significant (Graph Pad Software, Inc.).

[0139] FIG. 31 is a graph showing the concentration of anti-IL-12 p40 rat IgG2A (μg/mL) in plasma of anti-IL-12 p40 intraperitoneally (10 mg/kg) and intracecally (10 mg/kg and 1 mg/kg) administered treatment groups given daily (QD) or every third day (Q3D) when compared to vehicle control (Vehicle) and when IP is compared to IC. ELISA analysis was used to determine the concentration of anti-IL-12 p40 (IgG2A). Data presented as mean±SEM. Mann-Whitney's U-test and Student's t-test were used for statistical analysis on non-Gaussian and Gaussian data respectively. A value of p<0.05 was considered significant (Graph Pad Software, Inc.).

[0140] FIG. 32 is a graph showing the concentration of anti-IL-12 p40 antibody (IgG2A) (μg/mL) in the cecum and colon content of anti-IL-12 p40 antibody intraperitoneally (10 mg/kg) and intracecally (10 mg/kg and 1 mg/kg) administered treatment groups given daily (QD) or every third day (Q3D), when compared to vehicle control (Vehicle) and when IP is compared to IC. ELISA analysis was used to determine the concentration of rat IgG2A. Data presented as mean±SEM. Mann-Whitney's U-test and Student's t-test were used for statistical analysis on non-Gaussian and Gaussian data respectively. A value of p<0.05 was considered significant (Graph Pad Software, Inc.).

[0141] FIG. 33 is a graph showing the mean overall tissue immunolabel scores (intensity and extent) in acute DSS colitis mouse colon of anti-IL-12 p40 antibody intracecally-treated versus vehicle control-treated DSS mice. Data presented as mean±SEM.

[0142] FIG. 34 is a graph showing the mean location-specific immunolabel scores in acute DSS colitis mouse colon of anti-IL-12 p40 intracecally-treated versus vehicle control-treated DSS mice. Data presented as mean±SEM. Mann-Whitney's U-test and Student's t-test were used for statistical analysis on non-Gaussian and Gaussian data respectively. A value of p<0.05 was considered significant (Graph Pad Software, Inc.).

[0143] FIG. 35 is a graph showing the ratio of anti-IL-12 p40 antibody in the colon tissue to the plasma concentration of the anti-IL-12 p40 antibody in mice treated with the anti-IL-12 p40 antibody on day 0 (Q0) or day 3 (Q3D) of the study, when measured at the same time point after the initial dosing. An outlier animal was removed from Group 5.

[0144] FIG. 36 is a graph showing the concentration of Il-1β (μg/mL) in colon tissue lysate of acute DSS colitis mice treated with anti-IL-12 p40 intraperitoneally (10 mg/kg) every third day (Q3D) or intracecally (10 mg/kg or 1 mg/kg) administered daily (QD), when compared to vehicle control (Vehicle). Data presented as mean±SEM. Mann-Whitney's U-test and Student's t-test were used for statistical analysis on non-Gaussian and Gaussian data respectively. A value of p<0.05 was considered significant (Graph Pad Software, Inc.).

[0145] FIG. 37 is a graph showing the concentration of 11-6 (μg/mL) in colon tissue lysate of acute DSS colitis mice treated with anti-IL-12 p40 intraperitoneally (10 mg/kg) every third day (Q3D) or intracecally (10 mg/kg or 1 mg/kg) administered daily (QD), when compared to vehicle control (Vehicle). Data presented as mean±SEM. Mann-Whitney's U-test and Student's t-test were used for statistical analysis on non-Gaussian and Gaussian data respectively. A value of p<0.05 was considered significant (Graph Pad Software, Inc.

[0146] FIG. 38 is a graph showing the concentration of Il-17A (μg/mL) in colon tissue lysate of acute DSS colitis mice treated with anti-IL-12 p40 intraperitoneally (10 mg/kg) every third day (Q3D) or intracecally (10 mg/kg and 1 mg/kg) administered daily (QD), when compared to vehicle control (Vehicle). Data presented as mean±SEM. Mann-Whitney's U-test and Student's t-test were used for statistical analysis on non-Gaussian and Gaussian data respectively. A value of p<0.05 was considered significant (Graph Pad Software, Inc.).

[0147] FIG. 39 is a graph showing the percentage (%) change in body weight at day 14 (±SEM) for DSS mice treated with DATK32 (anti-α4β7) antibody intraperitoneally (25 mg/kg) every third day (Q3D) or intracecally (25 mg/kg or 5 mg/kg) administered daily (QD), when compared to vehicle control (Vehicle) and when IC is compared to IP. Data presented as mean±SEM. Mann-Whitney's U-test and Student's t-test were used for statistical analysis on non-Gaussian and Gaussian data respectively. A value of p<0.05 was considered significant (Graph Pad Software, Inc.).

[0148] FIG. 40 is a graph showing the plasma concentration of DATK32 rat IgG2A (μg/mL) of intraperitoneally (25 mg/kg) and intracecally (25 mg/kg and 5 mg/kg) administered treatment groups given daily (QD) or every third day (Q3D), where IP is compared to IC. Data presented as mean±SEM. Mann-Whitney's U-test and Student's t-test were used for statistical analysis on non-Gaussian and Gaussian data respectively. A value of p<0.05 was considered significant (Graph Pad Software, Inc.).

[0149] FIG. 41 is a graph showing the concentration of DATK32 rat IgG2A antibody (μg/mL) in cecum and colon content of intraperitoneally (25 mg/kg) or intracecally (25 mg/kg and 5 mg/kg) administered treatment groups given daily (QD) or every third day (Q3D), where IP is compared to IC. Data presented as mean±SEM. Mann-Whitney's U-test and Student's t-test were used for statistical analysis on non-Gaussian and Gaussian data respectively. A value of p<0.05 was considered significant (Graph Pad Software, Inc.).

[0150] FIG. 42 is a graph showing the concentration of DATK32 rat IgG2A (μg/mL) in the colon content of intraperitoneally (25 mg/kg) or intracecally (25 mg/kg and 5 mg/kg) administered treatment groups given daily (QD), and concentration over time (1, 2, 4, 24, and 48 hours), where IP is compared to IC. Data presented as mean±SEM. Mann-Whitney's U-test and Student's t-test were used for statistical analysis on non-Gaussian and Gaussian data respectively. A value of p<0.05 was considered significant (Graph Pad Software, Inc.).

[0151] FIG. 43 is a graph showing the concentration of DATK32 rat IgG2A (μg/g) in colon tissue of intraperitoneally (25 mg/kg) or intracecally (25 mg/kg and 5 mg/kg) administered treatment groups given daily (QD) or every third day (Q3D), where IP is compared to IC. Data presented as mean±SEM. Mann-Whitney's U-test and Student's t-test were used for statistical analysis on non-Gaussian and Gaussian data respectively. A value of p<0.05 was considered significant (Graph Pad Software, Inc.).

[0152] FIG. 44 is a graph showing the concentration of DATK32 rat IgG2A (μg/g) in the colon tissue of intraperitoneally (25 mg/kg) or intracecally (25 mg/kg and 5 mg/kg) administered treatment groups given daily (QD), and the concentration over time (1, 2, 4, 24, and 48 hours) was determined, where IP is compared to IC. Data presented as mean±SEM. Mann-Whitney's U-test and Student's t-test were used for statistical analysis on non-Gaussian and Gaussian data respectively. A value of p<0.05 was considered significant (Graph Pad Software, Inc.).

[0153] FIG. 45 is a graph showing the mean overall tissue immunolabel scores (intensity and extent) in acute DSS colitis mouse colon of DATK32 (anti-α4β7) antibody treated versus vehicle control (Vehicle) treated DSS mice. The data are presented as mean±SEM.

[0154] FIG. 46 is a graph showing the mean location-specific immunolabel scores in acute DSS colitis mouse colon of DATK32 (anti-α4β7) antibody-treated versus vehicle control (Vehicle)-treated DSS mice. Data presented as mean±SEM. Mann-Whitney's U-test and Student's t-test were used for statistical analysis on non-Gaussian and Gaussian data respectively. A value of p<0.05 was considered significant (Graph Pad Software, Inc.).

[0155] FIG. 47 is a graph showing the ratio of the DATK-32 antibody in the colon tissue to the plasma concentration of the DATK-32 antibody in mice treated with the DATK-32 antibody on day 0 (Q0) or day 3 (Q3D) of the study (Groups 9-12), when measured after initial dosing.

[0156] FIG. 48 is a graph showing the mean percentage of Th memory cells (mean±SEM) in blood for DATK32 (anti-α4β7) antibody intraperitoneally (25 mg/kg) or intracecally (25 mg/kg or 5 mg/kg) administered treatment groups given daily (QD) or every third day (Q3D), when compared to vehicle control (Vehicle) and when IP is compared to IC. Mean percentage Th memory cells were measured using FACS analysis. Data presented as mean±SEM. Mann-Whitney's U-test and Student's t-test were used for statistical analysis on non-Gaussian and Gaussian data respectively. A value of p<0.05 was considered significant (Graph Pad Software, Inc.).

[0157] FIG. 49 is an exemplary image of a histological section of a distal transverse colon of Animal 1501 showing no significant lesions (i.e., normal colon).

[0158] FIG. 50 is an exemplary image of a histological section of a distal transverse colon of Animal 2501 (treated with TNBS) showing areas of necrosis and inflammation.

[0159] FIG. 51 is a representative graph of plasma adalimumab concentrations over time following a single subcutaneous (SQ) or topical administration of adalimumab. The plasma concentrations of adalimumab were determined 6, 12, 24, and 48 hours after administration of adalimumab. N/D=not detectable.

[0160] FIG. 52 is a representative table of the plasma adalimumab concentrations (μg/mL) as shown in FIG. 4.6.

[0161] FIG. 53 is a graph showing the concentration of TNFα (pg/mL per mg of total protein) in non-inflamed and inflamed colon tissue after intracecal administration of adalimumab, as measured 6, 12, 24, and 24 hours after the initial dosing.

[0162] FIG. 54 is a graph showing the concentration of TNFα (pg/mL per mg of total protein) in colon tissue after subcutaneous or intracecal (topical) administration of adalimumab, as measured 48 hours after the initial dosing.

[0163] FIG. 55 is a graph showing the percentage (%) change in body weight at day 14 (±SEM) in acute DSS colitis mice treated with cyclosporine A orally (10 mg/kg) every third day (Q3D) or intracecally (10 mg/kg or 3 mg/kg) daily (QD), when compared to vehicle control (Vehicle). Data presented as mean±SEM. Mann-Whitney's U-test and Student's t-test were used for statistical analysis on non-Gaussian and Gaussian data respectively. A value of p<0.05 was considered significant (Graph Pad Software, Inc.).

[0164] FIG. 56 is a graph showing the plasma cyclosporine A (CsA) (ng/mL) concentration over time (1 h, 2 h, 4 h, and 24 h) in acute DSS colitis mice treated daily (QD) with orally (PO) (10 mg/kg) or intracecally (IC) (10 mg/kg or 3 mg/kg) administered CsA. Data presented as mean±SEM.

[0165] FIG. 57 is a graph showing the colon tissue cyclosporine A (CsA) (ng/g) concentration over time (1 h, 2 h, 4 h and 24 h) in acute DSS colitis mice treated daily (QD) with orally (PO) (10 mg/kg) or intracecally (IC) (10 mg/kg or 3 mg/kg) administered CsA. Data presented as mean±SEM.

[0166] FIG. 58 is a graph showing the peak colon tissue cyclosporine A (CsA) (ng/g) concentration in acute DSS colitis mice treated daily (QD) with orally (PO) (10 mg/kg) or intracecally (IC) (10 mg/kg or 3 mg/kg) administered CsA. Data presented as mean±SEM.

[0167] FIG. 59 is a graph showing the trough tissue concentration of cyclosporine (CsA) (ng/g) in colon of acute DSS colitis mice treated daily (QD) with orally (PO) (10 mg/kg) or intracecally (IC) (10 mg/kg or 3 mg/kg) administered CsA. Data presented as mean±SEM.

[0168] FIG. 60 is a graph showing the interleukin-2 (Il-2) concentration (μg/mL) in colon tissue of acute DSS colitis mice treated daily (QD) with orally (PO) (10 mg/kg) or intracecally (IC) (10 mg/kg or 3 mg/kg) administered CsA, where PO is compared to IC. Data presented as mean±SEM. Mann-Whitney's U-test and Student's t-test were used for statistical analysis on non-Gaussian and Gaussian data respectively. A value of p<0.05 was considered significant (Graph Pad Software, Inc.).

[0169] FIG. 61 is a graph showing the interleukin-6 (Il-6) concentration (μg/mL) in colon tissue of acute DSS colitis mice treated daily (QD) with orally (PO) (10 mg/kg) or intracecally (IC) (10 mg/kg or 3 mg/kg) administered CsA. Data presented as mean±SEM.

[0170] FIG. 62 illustrates a nonlimiting example of a system for collecting, communicating and/or analyzing data about a subject, using an ingestible device.

[0171] FIGS. 63A-63F are graphs showing rat IgG2A concentration as measured in (A) colon homogenate, (B) mLN homogenate, (C) small intestine homogenate, (D) cecum contents, (E) colon contents, and (F) plasma by ELISA. Standards were prepared with plasma matrix. Samples were diluted 1:50 before analysis. Sample 20 was removed from cecum contents analysis graph (outlier). *p<0.05; **p<0.01; ****p<0.001 were determined using the unpaired t test.

[0172] FIG. 64 illustrates a tapered silicon bellows.

[0173] FIG. 65 illustrates a tapered silicone bellows in the simulated device jig.

[0174] FIG. 66 illustrates a smooth PVC bellows.

[0175] FIG. 67 illustrates a smooth PVC bellows in the simulated device jig.

[0176] FIG. 68 demonstrates a principle of a competition assay performed in an experiment.

[0177] FIG. 69 shows AlphaLISA data.

[0178] FIG. 70 shows AlphaLISA data.

[0179] FIG. 71 shows AlphaLISA data.

[0180] FIG. 72 is a flowchart of illustrative steps of a clinical protocol, in accordance with some embodiments of the disclosure.

[0181] FIG. 73 is a graph showing the level of FAM-SMAD7-AS oligonucleotide in the cecum tissue of DSS-induced colitis mice at 12-hours. The bars represent from left to right, Groups 2 through 5 in the experiment described in Example 9.

[0182] FIG. 74 is a graph showing the level of FAM-SMAD7-AS oligonucleotide in the colon tissue of DSS-induced colitis mice at 12-hours. The bars represent from left to right, Groups 2 through 5 in the experiment described in Example 9.

[0183] FIG. 75 is a graph showing the level of FAM-SMAD7-AS oligonucleotide in the cecum contents of DSS-induced colitis mice at 12-hours. The bars represent from left to right, Groups 2 through 5 in the experiment described in Example 9.

[0184] FIG. 76 is a graph showing the mean concentration of tacrolimus in the cecum tissue and the proximal colon tissue 12 hours after intra-cecal or oral administration of tacrolimus to swine as described in Example 10.

[0185] FIG. 77 is a graph showing the mean concentration of tacrolimus in the blood 1 hour, 2 hours, 3 hours, 4 hours, 6 hours and 12 hours after intra-cecal (IC) or oral administration (PO) of tacrolimus to swine as described in Example 13.

[0186] FIG. 78 is a graph showing the AUC_{0-12 hours} of tacrolimus in the blood after intra-cecal (IC) or oral administration (PO) of tacrolimus in swine as described in Example 13.

[0187] FIG. 79 is a graph showing the mean concentration of tacrolimus in the cecum tissue, the proximal colon tissue, the spiral colon tissue, the transverse colon tissue, and the distal colon tissue after intra-cecal (IC) or oral administration (PO) of tacrolimus in swine as described in Example 13. **** P<0.0001, *** P<0.001.

[0188] FIG. 80 is a graph showing the mean concentration of tacrolimus in the cecum lumen, the proximal lumen, the spiral colon lumen, the transverse colon lumen, and the distal colon lumen in swine after intra-cecal (IC) or oral administration (PO) of tacrolimus in swine as described in Example 13. **** P<0.0001, *** P<0.001

[0189] FIG. 81 is a bar graph showing the mean concentration of tacrolimus in the rectal content 1 hour, 3 hours, 6 hours and 12 hours after intra-cecal (IC) or oral administration (PO) of tacrolimus to swine as described in Example 13.

[0190] FIG. 82 is a line graph showing the mean concentration of tacrolimus in the rectal content 1 hour, 3 hours, 6 hours and 12 hours after intra-cecal (IC) or oral administration (PO) of tacrolimus to swine as described in Example 13.

[0191] FIG. 83 is a graph showing the mean concentration of a SMAD7 antisense molecule (SMAD7-AS-FAM) in the cecum tissue in untreated swine or in swine after intra-cecal (IC) or oral administration(PO) of SMAD7-AS-FAM as described in Example 9.

[0192] FIG. 84 is a graph showing the mean concentration of SMAD7-AS-FAM in the colon tissue in untreated swine or in swine after intra-cecal (IC) or oral administration(PO) of SMAD7-AS-FAM as described in Example 9.

[0193] FIG. 85 is a graph showing the mean concentration of SMAD7-AS-FAM in the colon contents in untreated swine or in swine after intra-cecal (IC) or oral administration(PO) of SMAD7-AS-FAM as described in Example 9.

[0194] FIG. 86 is a graph showing the mean concentration of SMAD7-AS-FAM in the cecum contents in untreated swine or in swine after intra-cecal (IC) or oral administration(PO) of SMAD7-AS-FAM as described in Example 9.

[0195] FIG. 87 is a graph showing the mean concentration of tacrolimus in the blood of swine 1 hour, 2 hours, 3 hours, 4 hours, 6 hours, and 12 hours after intra-cecal (IC) or oral administration (PO) of tacrolimus as described in Example 10.

[0196] FIG. 88 is a graph showing the AUC_{0-12 hours} of tacrolimus in the blood of swine after intra-cecal (IC) or oral administration (PO) of tacrolimus as described in Example 10.

[0197] FIG. 89 is a representative table showing the Tmax, Cmax, trough (at 12 hours post-administration), and AUC_{0-12 hours} of tacrolimus in swine after intra-cecal (IC) or oral administration (PO) as described in Example 10.

[0198] FIG. 90 is a graph showing the mean concentration of tacrolimus in the cecum, the proximal colon, the spiral colon, the transverse colon, and the distal colon of swine after intra-cecal (IC) or oral administration (PO) of tacrolimus as described in Example 10.

[0199] FIG. 91 is a graph showing the mean concentration of tacrolimus in the cecum lumen, the proximal colon lumen, the spiral colon lumen, the transverse colon lumen, and the distal colon lumen of swine after intra-cecal (IC) or oral administration (PO) of tacrolimus as described in Example 10.

[0200] FIG. 92 is a graph showing the mean concentration of tacrolimus in the rectal content of swine at 1 hour, 3 hours, 6 hours, and 12 hours after intra-cecal (IC) or oral administration (PO) of tacrolimus as described in Example 10.

[0201] FIG. 93 is a representative table showing the quantitative histological grading of colitis as described in Example 11.

[0202] FIG. 94 is a graph showing the histopathological scores of two slides for animal 1502 (healthy control swine treated with placebo), animal 2501 (swine with 8.5% DSS-induced colitis treated with 1.86 mg/kg adalimumab), animal 2503 (swine with 8.5% DSS-induced colitis treated with 1.86 mg/kg adalimumab), and animal 2504 (swine with 8.5% DSS-induced colitis treated with 1.86 mg/kg adalimumab) at the placebo or adalimumab administration site prior to administration of placebo or adalimumab, respectively. Absence of a bar for a particular parameter indicates that the value for this parameter was 0.

[0203] FIG. 95 is a representative hematoxylin- and eosin-stained image of the transverse colon of animal 1501 (healthy control swine). M, mucosa; SM, submucosa; TM, tunica muscularis. Numerous intestinal crypts (asterisks) are present and the surface epithelium (top two arrows) is intact. Mononuclear inflammatory cells are prominent in the lamina propria (light arrows) of the mucosa and extend a short distance into the submucosa (bottom two arrows). This amount of inflammatory cell infiltrate was expected background change and considered unrelated to the experimental protocol.

[0204] FIG. 96 is a representative hematoxylin- and eosin-stained image of the transverse colon of animal 2504 (8.5% DSS-induced colitis swine administered 1.86 mg/kg adalimumab) prior to administration of adalimumab. M, mucosa; SM, submucosa; TM, tunica muscularis. Extensive loss (light asterisks) of intestinal crypts is present in the mucosa. Scattered crypts remain (dark asterisks) and are often dilated and filled with inflammatory cell debris and mucus. The luminal epithelium persists in some areas (upper left arrow), but is absent in others (erosion; top middle and top right arrows). Inflammatory cells in the mucosa (light arrow) are abundant and extend into the submucosa (bottom left and bottom middle arrows).

[0205] FIG. 97 is a representative immunohistochemistry micrograph of the transverse colon of animal 1501 (healthy control swine) stained for human IgG. M, mucosa; SM, submucosa; TM, tunica muscularis. Serosal surface (arrows) and loose connective mesentery tissue (asterisks) are indicated. Faint 3,3-diaminobenzidine (DAB) staining in this tissue was considered a background effect and not indicative of human IgG.

[0206] FIG. 98 is a representative immunohistochemistry micrograph of the transverse colon of animal 2504 (8.5% DSS-induced colitis swine treated with 1.86 mg/kg dose of adsalimumab) stained for human IgG. M, mucosa; SM, submucosa; TM, tunica muscularis. DAB staining demonstrates the presence of human IgG at the surface of luminal epithelium (two top right arrows) and at the luminal surface of an area of inflammation and erosion (top two left arrows). Intense staining is also present in the loose connective mesentery tissue (asterisks) and extends a short distance into the outer edge of the tunica muscularis (bottom left two arrows). This type of staining was considered strong (grade 4) or very strong (grade 5).

[0207] FIG. 99 is a representative immunohistochemistry micrograph of the large intestine of animal 2504 (8.5% DSS-induced colitis swine treated with 1.86 mg/kg adalimumab) stained for human IgG. M, mucosa; SM, submucosa; TM, tunica muscularis. Lesions of DSS-induced colitis are present in this section. The luminal epithelium is absent (erosion) and diffuse loss of crypts (glands) is seen (top two asterisks). Very strong (grade 5) DAB (brown) staining demonstrates the presence of human IgG in the loose mesentery connective tissue (bottom two arterisks) and extending a short distance into the outer edge of the tunica muscularis (bottom two arrows). Strong (grade 4) staining for human IgG is seen at the eroded luminal surface (top two arrows pointing down) and within the inflammatory exudate. Weak (grade 2) staining for human IgG extends into the lamina propria (top two arrows pointing up) near the luminal surface.

[0208] FIG. 100 is a graph showing the presence of human IgG (adalimumab) at the specified locations (lumen/superficial mucosa, lamina propria, and tunica muscularis-outer/serosa) (scored level) in two slides from each of animal 1502 (placebo-treated healthy control swine), animal 2501 (swine with 8.5% DSS-induced colitis treated with 1.86 mg/kg adalimumab), animal 2503 (swine with 8.5% DSS-induced colitis treated with 1.86 mg/kg adalimumab) and animal 2504 (swine with 8.5% DSS-induced colitis treated with 1.86 mg/kg adalimumab) at the placebo or adalimumab administration site. Absence of a bar for a particular location indicates that the value for this location was 0. Scoring: 0=not present; 1=minimal; 2=weak; 3=moderate; 4=strong; and 5=very strong immunolabel.

[0209] FIG. 101 is a graph showing the mean of Th memory cells (mean±SEM) in Peyer's Patches (PP) for DATK32 antibody (anti-α4β7 integrin antibody) intraperitoneally (25 mg/kg) or intracecally (25 mg/kg or 5 mg/kg) administered treatment groups given daily (QD) or every third day (Q3D), when compared to vehicle control (Vehicle) and when IP is compared to IC. Mean Th memory cells were measured using FACS analysis. Mann-Whitney's U-test and Student's t-test were used for statistical analysis on non-Gaussian and Gaussian data respectively. A value of p<0.05 was considered significant (Graph Pad Software, Inc.).

[0210] FIG. 102 is a graph showing the mean of Th memory cells (mean±SEM) in mesenteric lymph nodes (mLN) for DATK32 antibody (anti-α4β7 integrin antibody) intraperitoneally (25 mg/kg) or intracecally (25 mg/kg or 5 mg/kg) administered treatment groups given daily (QD) or every third day (Q3D), when compared to vehicle control (Vehicle) and when IP is compared to IC. Mean Th memory cells were measured using FACS analysis. Mann-Whitney's U-test and Student's t-test were used for statistical analysis on non-Gaussian and Gaussian data respectively. A value of p<0.05 was considered significant (Graph Pad Software, Inc.).

[0211] FIG. 103 is a graph showing the Disease Activity Index (DAI) of naive mice (Group 1), mice administered vehicle only both intraperitoneally (IP) and intracecally (IC) (Group 2), mice administered an anti-TNFα antibody IP and vehicle IC (Group 7), and mice administered an anti-TNFα antibody IC and vehicle IP (Group 8) at Day 28 and Day 42 of the study described in Example 16.

[0212] FIG. 104 is a set of graphs showing the colonic tissue concentration of TNFα, IL-17A, IL-4, and IL-22 in mice administered vehicle only both IP and IC (Group 2), mice administered IgG control antibody IP and vehicle IC (Group 3), mice administered IgG control IC and vehicle IP (Group 4), mice administered anti-TNFα antibody IP and vehicle IC (Group 7), and mice administered anti-TNFα antibody IC and vehicle IP (Group 8) at Day 42 of the study described in Example 16.

[0213] FIG. 105 is a graph showing the Disease Activity Index (DAI) of naive mice (Group 1), mice administered vehicle only both IP and IC (Group 2), mice administered an anti-IL12 p40 antibody IP and vehicle IC (Group 5), and mice administered an anti-IL12 p40 antibody IC and vehicle IP (Group 6) at Day 28 and Day 42 of the study described in Example 16.

[0214] FIG. 106 is a set of graphs showing the colonic tissue concentration of IFNgamma, IL-6, IL-17A, TNFα, IL-22, and IL-1b in nave mice (Group 1), mice administered vehicle only both IP and IC (Group 2), mice administered anti-IL12 p40 antibody IP and vehicle IC (Group 5), and mice administered anti-IL12 p40 antibody IC and vehicle IP (Group 8) at Day 42 of the study described in Example 16.

### DETAILED DESCRIPTION

[0215] The present disclosure is directed to various methods and formulations for treating diseases of the gastrointestinal tract with a therapeutic agent as disclosed herein. For example, in an embodiment, a method of treating a disease of the gastrointestinal tract in a subject comprises administering to the subject a pharmaceutical formulation comprising a therapeutic agent as disclosed herein wherein the pharmaceutical formulation is released in the subject's gastrointestinal tract proximate to one or more sites of disease. For example, in an embodiment, the pharmaceutical formulation comprises a therapeutically effective amount of a therapeutic agent as disclosed herein.

[0216] In some embodiments, the formulation is contained in an ingestible device, and the device releases the formulation at a location proximate to the site of disease. The location of the site of disease may be predetermined. For example, an ingestible device, the location of which within the GI tract can be accurately determined as disclosed herein, may be used to sample one or more locations in the GI tract and to detect one or more analytes, including markers of the disease, in the GI tract of the subject. A pharmaceutical formulation may be then administered via an ingestible device and released at a location proximate to the predetermined site of disease. The release of the formulation may be triggered autonomously, as further described herein.

[0217] The following disclosure illustrates aspects of the formulations and methods embodied in the claims.

### Formulations, Including Pharmaceutical Formulations

[0218] As used herein, a “formulation” of an immune modulator may refer to either the immune modulator in pure form such as, for example, the lyophilized immune modulator or a mixture of the immune modulator with one or more physiologically acceptable carriers, excipients or stabilizers. Thus, therapeutic formulations or medicaments can be prepared by mixing the immune modulator having the desired degree of purity with optional physiologically acceptable carriers, excipients or stabilizers (Remington's Pharmaceutical Sciences 16th edition, Osol, A. Ed. (1980)), in the form of lyophilized formulations or aqueous solutions. Acceptable carriers, excipients, or stabilizers are nontoxic to recipients at the dosages and concentrations employed, and include buffers such as phosphate, citrate, and other organic acids; antioxidants including ascorbic acid and methionine; preservatives (such as octadecyldimethylbenzyl ammonium chloride; hexamethonium chloride; benzalkonium chloride, benzethonium chloride; phenol, butyl or benzyl alcohol; alkyl parabens such as methyl or propyl paraben; catechol; resorcinol; cyclohexanol; 3-pentanol; and m-cresol); low molecular weight (less than about 10 residues) antibody; proteins, such as serum albumin, gelatin, or immunoglobulins; hydrophilic polymers such as polyvinylpyrrolidone; amino acids such as glycine, glutamine, asparagine, histidine, arginine, or lysine; monosaccharides, disaccharides, and other carbohydrates including glucose, mannose, or dextrins; chelating agents such as EDTA; sugars such as sucrose, mannitol, trehalose or sorbitol; salt-forming counter-ions such as sodium; metal complexes (e.g., Zn-protein complexes); and/or non-ionic surfactants such as TWEEN™, PLURONICS™ or polyethylene glycol (PEG). Exemplary pharmaceutically acceptable carriers herein further include insterstitial drug dispersion agents such as soluble neutral-active hyaluronidase glycoproteins (sHASEGP), for example, human soluble PH-20 hyaluronidase glycoproteins, such as rHuPH20 (HYLENEX®, Baxter International, Inc.). Certain exemplary sHASEGPs and methods of use, including rHuPH20, are described in US Patent Publication Nos. 2005/0260186 and 2006/0104968. In one aspect, a sHASEGP is combined with one or more additional glycosaminoglycanases such as chondroitinases. Exemplary lyophilized formulations are described in U.S. Pat. No. 6,267,958. Aqueous formulations include those described in U.S. Pat. No. 6,171,586 and WO2006/044908, the latter formulations including a histidine-acetate buffer.

[0219] A formulation of an immune modulator as disclosed herein, e.g., sustained-release formulations, can further include a mucoadhesive agent, e.g., one or more of polyvinyl pyrolidine, methyl cellulose, sodium carboxyl methyl cellulose, hydroxyl propyl cellulose, carbopol, a polyacrylate, chitosan, a eudragit analogue, a polymer, and a thiomer. Additional examples of mucoadhesive agents that can be included in a formulation with a therapeutic agent as disclosed herein are described in, e.g., Peppas et al., Biomaterials 17(16):1553-1561, 1996; Kharenko et al., Pharmaceutical Chemistry J. 43(4):200-208, 2009; Salamat-Miller et al., Adv. Drug Deliv. Reviews 57(11):1666-1691, 2005; Bernkop-Schnurch, Adv. Drug Deliv. Rev. 57(11):1569-1582, 2005; and Harding et al., Biotechnol. Genet. Eng. News 16(1):41-86, 1999.

[0220] In some embodiments, components of a formulation may include any one of the following components, or any combination thereof: Acacia, Alginate, Alginic Acid, Aluminum Acetate, an antiseptic, Benzyl Alcohol, Butyl Paraben, Butylated Hydroxy Toluene, an antioxidant. Citric acid, Calcium carbonate, Candelilla wax, a binder, Croscarmellose sodium, Confectioner sugar, Colloidal silicone dioxide, Cellulose, Carnuba wax, Corn starch, Carboxymethylcellulose calcium, Calcium stearate, Calcium disodium EDTA, Chelation agents, Copolyvidone, Castor oil hydrogenated, Calcium hydrogen phosphate dehydrate, Cetylpyridine chloride, Cysteine HCl, Crosspovidone, Dibasic Calcium Phosphate, Disodium hydrogen phosphate, Dimethicone, Erythrosine Sodium, Ethyl Cellulose, Gelatin, Glyceryl monooleate, Glycerin, Glycine, Glyceryl monostearate, Glyceryl behenate, Hydroxy propyl cellulose, Hydroxyl propyl methyl cellulose, Hypromellose, HPMC Pthalate, Iron oxides or ferric oxide, Iron oxide yellow, Iron oxide red or ferric oxide, Lactose (hydrous or anhydrous or monohydrate or spray dried), Magnesium stearate, Microcrystalline cellulose, Mannitol, Methyl cellulose Magnesium carbonate, Mineral oil, Methacrylic acid copolymer, Magnesium oxide, Methyl paraben, PEG, Polysorbate 80, Propylene glycol, Polyethylene oxide, Propylene paraben, Polaxamer 407 or 188 or plain, Potassium bicarbonate, Potassium sorbate, Potato starch, Phosphoric acid, Polyoxy140 stearate, Sodium starch glycolate, Starch pregelatinized, Sodium crossmellose, Sodium lauryl sulfate, Starch, Silicon dioxide, Sodium benzoate Stearic acid, Sucrose base for medicated confectionery, a granulating agent, Sorbic acid, Sodium carbonate, Saccharin sodium, Sodium alginate, Silica gel, Sorbiton monooleate, Sodium stearyl fumarate, Sodium chloride, Sodium metabisulfite, Sodium citrate dehydrate, Sodium starch, Sodium carboxy methyl cellulose, Succinic acid, Sodium propionate, Titanium dioxide, Talc, Triacetin, Triethyl citrate.

[0221] Accordingly, in some embodiments of the method of treating a disease as disclosed herein, the method comprises administering to the subject a pharmaceutical composition that is a formulation as disclosed herein. In some embodiments the formulation is a dosage form, which may be, as an example, a solid form such as, for example, a capsule, a tablet, a sachet, or a lozenge; or which may be, as an example, a liquid form such as, for example, a solution, a suspension, an emulsion, or a syrup.

[0222] In some embodiments the formulation is not comprised in an ingestible device. In some embodiments wherein the formulation is not comprised in an ingestible device, the formulation may be suitable for oral administration. The formulation may be, for example, a solid dosage form or a liquid dosage form as disclosed herein. In some embodiments wherein the formulation is not comprised in an ingestible device, the formulation may be suitable for rectal administration. The formulation may be, for example, a dosage form such as a suppository or an enema. In embodiments where the formulation is not comprised in an ingestible device, the formulation releases the immune modulator at a location in the gastrointestinal tract of the subject that is proximate to an intended site of release in the GI tract. Such localized release may be achieved, for example, with a formulation comprising an enteric coating. Such localized release may be achieved, an another example, with a formulation comprising a core comprising one or more polymers suitable for controlled release of an active substance. A non-limiting list of such polymers includes: poly(2-(diethylamino)ethyl methacrylate, 2-(dimethylamino)ethyl methacrylate, poly(ethylene glycol), poly(-aminoethyl methacrylate), (2-hydroxypropyl)methacrylamide, poly((3-benzyl-1-aspartate), poly(N-isopropylacrylamide), and cellulose derivatives.

[0223] In some embodiments the formulation is comprised in an ingestible device as disclosed herein. In some embodiments wherein the formulation is comprised in an ingestible device, the formulation may be suitable for oral administration. The formulation may be, for example, a solid dosage form or a liquid dosage form as disclosed herein. In some embodiments the formulation is suitable for introduction and optionally for storage in the device. In some embodiments the formulation is suitable for introduction and optionally for storage in the reservoir comprised in the device. In some embodiments the formulation is suitable for introduction and optionally for storage in the reservoir comprised in the device. Thus, in some embodiments, provided herein is a reservoir comprising a therapeutically effective amount of an immune modulator, wherein the reservoir is configured to fit into an ingestible device. In some embodiments, the reservoir comprising a therapeutically effective amount of an immune modulator is attachable to an ingestible device. In some embodiments, the reservoir comprising a therapeutically effective amount of an immune modulator is capable of anchoring itself to the subject's tissue. As an example, the reservoir capable of anchoring itself to the subject's tissue comprises silicone. As an example, the reservoir capable of anchoring itself to the subject's tissue comprises polyvinyl chloride.

[0224] In some embodiments the formulation is suitable for introduction in the spray catheters disclosed herein.

[0225] The formulation/medicament herein may also contain more than one active compound as necessary for the particular indication being treated, for example, those with complementary activities that do not adversely affect each other. For instance, the formulation may further comprise another immune modulator or a chemotherapeutic agent. Such molecules are suitably present in combination in amounts that are effective for the purpose intended.

[0226] The active ingredients may also be entrapped in microcapsule prepared, for example, by coacervation techniques or by interfacial polymerization, for example, hydroxymethylcellulose or gelatin-microcapsule and poly-(methylmethacylate) microcapsule, respectively, in colloidal drug delivery systems (for example, liposomes, albumin microspheres, microemulsions, nano-particles and nanocapsules) or in macroemulsions. Such techniques are disclosed in Remington's Pharmaceutical Sciences 16th edition, Osol, A. Ed. (1980).

[0227] The formulations to be used for in vivo administration must be sterile. This is readily accomplished by filtration through sterile filtration membranes.

[0228] Sustained-release preparations may be prepared. Suitable examples of sustained-release preparations include semipermeable matrices of solid hydrophobic polymers containing the immune modulator, which matrices are in the form of shaped articles, e.g., films, or microcapsule. Examples of sustained-release matrices include polyesters, hydrogels (for example, poly(2-hydroxyethyl-methacrylate), or poly(vinylalcohol)), polylactides (U.S. Pat. No. 3,773,919), copolymers of L-glutamic acid and γ ethyl-L-glutamate, non-degradable ethylene-vinyl acetate, degradable lactic acid-glycolic acid copolymers such as the LUPRON DEPOT™ (injectable microspheres composed of lactic acid-glycolic acid copolymer and leuprolide acetate), and poly-D-(−)-3-hydroxybutyric acid. While polymers such as ethylene-vinyl acetate and lactic acid-glycolic acid enable release of molecules for over 100 days, certain hydrogels release proteins for shorter time periods. When encapsulated immune modulators remain in the body for a long time, they may denature or aggregate as a result of exposure to moisture at 37° C., resulting in a loss of biological activity and possible changes in immunogenicity. Rational strategies can be devised for stabilization depending on the mechanism involved. For example, if the aggregation mechanism is discovered to be intermolecular S—S bond formation through thio-disulfide interchange, stabilization may be achieved by modifying sulfhydryl residues, lyophilizing from acidic solutions, controlling moisture content, using appropriate additives, and developing specific polymer matrix compositions.

[0229] Pharmaceutical formulations may contain one or more immune modulators. The pharmaceutical formulations may be formulated in any manner known in the art. In some embodiments the formulations include one or more of the following components: a sterile diluent (e.g., sterile water or saline), a fixed oil, polyethylene glycol, glycerin, propylene glycol, or other synthetic solvents, antibacterial or antifungal agents, such as benzyl alcohol or methyl parabens, chlorobutanol, phenol, ascorbic acid, thimerosal, and the like, antioxidants, such as ascorbic acid or sodium bisulfite, chelating agents, such as ethylenediaminetetraacetic acid, buffers, such as acetates, citrates, or phosphates, and isotonic agents, such as sugars (e.g., dextrose), polyalcohols (e.g., mannitol or sorbitol), or salts (e.g., sodium chloride), or any combination thereof. Liposomal suspensions can also be used as pharmaceutically acceptable carriers (see, e.g., U.S. Pat. No. 4,522,811, incorporated by reference herein in its entirety). The formulations can be formulated and enclosed in ampules, disposable syringes, or multiple dose vials. Where required, proper fluidity can be maintained by, for example, the use of a coating, such as lecithin, or a surfactant. Controlled release of the immune modulator can be achieved by implants and microencapsulated delivery systems, which can include biodegradable, biocompatible polymers (e.g., ethylene vinyl acetate, polyanhydrides, polyglycolic acid, collagen, polyorthoesters, and polylactic acid; Alza Corporation and Nova Pharmaceutical, Inc.).

[0230] In some embodiments, the immune modulator is present in a pharmaceutical formulation within the device.

[0231] In some embodiments, the immune modulator is present in solution within the device.

[0232] In some embodiments, the immune modulator is present in a suspension in a liquid medium within the device.

[0233] In some embodiments, the therapeutic agent as disclosed herein is present as a pure, powder (e.g., lyophilized) form of the therapeutic agent as disclosed herein.

### Definitions

[0234] By “ingestible,” it is meant that the device can be swallowed whole.

[0235] The terms “antibody” and “immunoglobulin” are used interchangeably in the broadest sense and include monoclonal antibodies (for example, full length or intact monoclonal antibodies), polyclonal antibodies, multivalent antibodies, multispecific antibodies (e.g., bispecific, trispecific etc. antibodies so long as they exhibit the desired biological activity) and may also include certain antibody fragments (as described in greater detail herein). An antibody can be human, humanized and/or affinity matured.

[0236] “Antibody fragments” comprise only a portion of an intact antibody, where in certain embodiments, the portion retains at least one, and typically most or all, of the functions normally associated with that portion when present in an intact antibody. In one embodiment, an antibody fragment comprises an antigen binding site of the intact antibody and thus retains the ability to bind antigen. In another embodiment, an antibody fragment, for example one that comprises the Fc region, retains at least one of the biological functions normally associated with the Fc region when present in an intact antibody, such as FcRn binding, antibody half-life modulation, ADCC function and complement binding. In one embodiment, an antibody fragment is a monovalent antibody that has an in vivo half-life substantially similar to an intact antibody. For example, such an antibody fragment may comprise on antigen binding arm linked to an Fc sequence capable of conferring in vivo stability to the fragment.

[0237] The term “monoclonal antibody” as used herein refers to an antibody obtained from a population of substantially homogeneous antibodies, i.e., the individual antibodies comprising the population are identical except for possible naturally occurring mutations that may be present in minor amounts. Monoclonal antibodies are highly specific, being directed against a single antigen. Furthermore, in contrast to polyclonal antibody preparations that typically include different antibodies directed against different determinants (epitopes), each monoclonal antibody is directed against a single determinant on the antigen.

[0238] The monoclonal antibodies herein specifically include “chimeric” antibodies in which a portion of the heavy and/or light chain is identical with or homologous to corresponding sequences in antibodies derived from a particular species or belonging to a particular antibody class or subclass, while the remainder of the chain(s) is identical with or homologous to corresponding sequences in antibodies derived from another species or belonging to another antibody class or subclass, as well as fragments of such antibodies, so long as they exhibit the desired biological activity (U.S. Pat. No. 4,816,567; and Morrison et al, Proc. Natl. Acad. Sci. USA 81:6851-6855 (1984)).

[0239] “Treatment regimen” refers to a combination of dosage, frequency of administration, or duration of treatment, with or without addition of a second medication. “Effective treatment regimen” refers to a treatment regimen that will offer beneficial response to a patient receiving the treatment.

[0240] “Effective amount” refers to an amount of drug that offers beneficial response to a patient receiving the treatment. For example, an effective amount may be a Human Equivalent Dose (HED)

[0241] “Dispensable,” with reference to any substance, refers to any substance that may be released from an ingestible device as disclosed herein, or from a component of the device such as a reservoir. For example, a dispensable substance may be a therapeutic agent as disclosed herein, and/or a formulation comprising a therapeutic agent as disclosed herein.

[0242] “Patient response” or “patient responsiveness” can be assessed using any endpoint indicating a benefit to the patient, including, without limitation, (1) inhibition, to some extent, of disease progression, including slowing down and complete arrest; (2) reduction in the number of disease episodes and/or symptoms; (3) reduction in lesional size; (4) inhibition (i.e., reduction, slowing down or complete stopping) of disease cell infiltration into adjacent peripheral organs and/or tissues; (5) inhibition (i.e., reduction, slowing down or complete stopping) of disease spread; (6) decrease of auto-immune response, which may, but does not have to, result in the regression or ablation of the disease lesion; (7) relief, to some extent, of one or more symptoms associated with the disorder; (8) increase in the length of disease-free presentation following treatment; and/or (9) decreased mortality at a given point of time following treatment. The term “responsiveness” refers to a measurable response, including complete response (CR) and partial response (PR).

[0243] As used herein, “complete response” or “CR” means the disappearance of all signs of inflammation or remission in response to treatment. This does not necessarily mean the disease has been cured.

[0244] “Partial response” or “PR” refers to a decrease of at least 50% in the severity of inflammation, in response to treatment.

[0245] A “beneficial response” of a patient to treatment with a therapeutic agent and similar wording refers to the clinical or therapeutic benefit imparted to a patient at risk for or suffering from a inflammatory disease or condition that arises in a tissue originating from the endoderm. Such benefit includes cellular or biological responses, a complete response, a partial response, a stable disease (without progression or relapse), or a response with a later relapse of the patient from or as a result of the treatment with the agent.

[0246] As used herein, “non-response” or “lack of response” or similar wording means an absence of a complete response, a partial response, or a beneficial response to treatment with a therapeutic agent.

[0247] “A patient maintains responsiveness to a treatment” when the patient's responsiveness does not decrease with time during the course of a treatment.

[0248] A “symptom” of a disease or disorder (e.g., an inflammatory disease or condition that arises in tissue originating from the endoderm) is any morbid phenomenon or departure from the normal in structure, function, or sensation, experienced by a subject and indicative of disease.

[0249] “Mucosa-associated lymphoid tissue” or “MALT” refers to a diffuse system of small concentrations of lymphoid tissue found in various submucosal membrane sites of the body, such as the gastrointestinal tract, oral passage, nasopharyngeal tract, thyroid, breast, lung, salivary glands, eye, and skin.

[0250] “Gut-associated lymphoid tissue” or “GALT” refers to a part of the broader MALT and includes, e.g., Peyer's patches, mesenertic lymph nocdes, and isolated lymphoid follicles/intestinal lymphoid aggregates.

[0251] “Peyer's patches” refers to aggregated lymphoid modules organized into follicles and are important part of GALT. Peyer's patches are mainly present in the distal jejunum and the ileum.

[0252] “Mesenteric lymph nodes” refers to part of the paraaortic lymph node system that is a group of lymph nodes that lie between the layers of the mesentery and drain the gut tissues and deliver lymph to the thoracic duct. Mesenteric lymph nodes include the “superior mesenteric lymph nodes” which receive afferents from the jejunum, ileum, cecum, and the ascending and parts of the transverse colon. Mesenteric lymph nodes also include “inferior mesenteric lymph nodes” which are lymph nodes present throughout the hindgut. The hindgut, e.g., includes the distal third of the transverse colon and the splenic flexure, the descending colon, sigmoid colon, and the rectum. The lymph nodes drain into the superior mesenteric lymph nodes and ultimately to the preaortic lymph nodes.

[0253] “Paraaortic lymph nodes” refers to a group of mesenteric lymph nodes that lie in front of the lumbar vertebrae near the aorta. The paraaortic lymph nodes receive drainage from the gastrointestinal tract and the abdominal organs. Paraaortic lymph nodes include, e.g., retroaortic lymph nodes, lateral aortic lymph nodes, preaortic lymph nodes (e.g., Celiac, gastic, hepatic, and splenic lymph nodes), superior mesenteric lymph nodes (e.g., mesenteric, ileocolic, and mesocolic lymph nodes), and inferior mesenteric lymph nodes (e.g., pararectal lymph nodes).

[0254] As used herein, “accuracy,” when disclosed in connection with a specified location of a device within the GI tract of a subject, refers to the degree to which the location determined by the device conforms to the correct location, wherein the correct location is based on a generally accepted standard. The location within the GI tract of the subject determined by the device can be based on data, for example, light reflectance data, collected by the ingestible device. In some embodiments, the correct location can be based on external imaging devices, such as computer-aided tomography (CT), interpreted, for example, by a qualified clinician or physician. Therefore, percent accuracy (“% accuracy”) can refer to the percentage agreement between the location of the device in the GI tract as determined by the device, and the correct location, for example, as determined by CT, e.g., expressed as [(number of devices in which location determined by the device agrees with location as determined by CT/total devices administered to the subject or subjects)×100%], or, where only one device is administered per subject, [(number of subjects in which location determined by the device agrees with location as determined by CT/total number of subjects)×100%]. The latter formula for determining % accuracy was used in Example 14. In some embodiments, the accuracy with which the device determines a location refers to the accuracy with which the device determines that it is at a location pre-selected for drug release.

[0255] As used herein, an “autonomous device” refers to a device comprising one or more processors configured to independently control certain mechanisms or operations of the device while in the GI tract of a subject. Preferably, an autonomous device of the invention has no external electrical or wireless connections that control device mechanisms or operations, although connections such as wireless connections may be present to enable alternative device functions, such as transmitting data collected by the device to an external (ex vivo) system or receiver. The independently controlled mechanisms or operations of the autonomous device include, for example, triggering the release of a drug (or the formulation comprising the drug), triggering collection of one or more samples, and/or triggering the analysis of one or more samples; and/or determining the location of the device within the GI tract of the subject. Such a mechanism is referred to herein as an “autonomous mechanism;” for example, an “autonomous triggering mechanism” or an “autonomous localization mechanism,” respectively. Actively implementing such an autonomous triggering or localization mechanism is referred to as “autonomous triggering” or “autonomous localizing,” respectively. An “autonomous localization mechanism” is synonymous with a “self-localization mechanism.

[0256] As used herein, a “housing” is a portion of an ingestible device that defines the boundary between the interior of the device and the environment exterior to the device.

[0257] As used herein, a “self-localizing device” refers to a device comprising a mechanism or system that can be implemented autonomously to determine the location of the ingestible device in vivo, e.g., within the GI tract of a subject. Such a mechanism is referred to as a “self-localization mechanism.” A “self-localization mechanism” is synonymous with an “autonomous localization mechanism.”A self-localizing device does not require ex vivo visualization devices or systems, for example, using scintigraphy or computer-aided tomography (CT), to localize in the GI tract.

[0258] As used herein, “localizing the device” refers to determining a location of the device.

[0259] As used herein, “sensor” refers to a mechanism or portion of a mechanism configured to collect information regarding the surroundings of the ingestible device. Examples of “sensors” include environmental sensors and light sensors. Examples of environmental sensors include pH sensors and sensors capable to identifying muscle contractions and/or peristalsis.

[0260] As used herein, “time following transition” refers to elapsed time after passage of the device from one portion, section or subsection of the GI tract into an adjacent portion, section or subsection of the GI tract.

[0261] As used herein, “proximate” as disclosed in connection with release of a drug from a device to one or more disease sites, refers to a location that is sufficiently spatially close to the one or more disease sites such that releasing the drug at the location treats the disease. For example, when the drug is released proximate to the one or more disease sites, the drug may be released 150 cm or less, such as 125 cm or less, such as 100 cm or less, such as 50 cm or less, such as 40 cm or less, such as 30 cm or less, such as 20 cm or less, such as 10 cm or less, such as 5 cm or less, such as 2 cm or less, from the one or more sites of disease. The proximate location for drug release may be in the same section or subsection of the gastrointestinal tract as the one or more disease sites. In the alternative, the proximate location for drug release may be in a different section or subsection of the GI tract than the one or more disease sites; for example, the drug release may be proximal to the one or more disease sites. In a non-limiting example, the drug may be released in the cecum to treat a site of disease tissue in the ascending colon (i.e., distal to the cecum). In another non-limiting example, the drug may be released in the cecum to treat a site of disease tissue in one or more of the ascending colon, transverse colon, descending colon, or rectum. Thus, where the present application refers to release of a drug proximate to a site of disease, this may in some embodiments refer to release in a section or subsection of the GI tract which has been determined to contain a site of disease. The section may be selected from esophagus, stomach, duodenum, jejunum, ileum, cecum, ascending colon, transverse colon, descending colon, and rectum. The subsection may be selected from proximal duodenum, proximal jejunum, proximal ileum, proximal cecum, proximal ascending colon, proximal transverse colon, proximal descending colon, distal duodenum, distal jejunum, distal ileum, distal cecum, distal ascending colon, distal transverse colon, distal descending colon.

[0262] As used herein, the “total induction dose” is the sum of induction doses over a given time period.

[0263] As used herein, “proximal”, when used in connection with an anatomical structure, refers to a portion, section, or subsection that precedes, or is upstream of, an adjacent portion, section, or subsection of the anatomical structure. In some embodiments, proximal refers to a portion, section, or subsection that immediately precedes, or is immediately upstream of, an immediately adjacent portion, section, or subsection of the anatomical structure.

[0264] As used herein, “distal”, when used in connection with an anatomical structure, refers to a portion, section, or subsection that follows, or is downstream of, an adjacent portion, section, or subsection of the anatomical structure. In some embodiments, distal refers to a portion, section, or subsection that immediately follows, or is immediately downstream of, an immediately adjacent portion, section, or subsection of the anatomical structure.

[0265] As used herein, a reference to a drug's international nonproprietary name (INN) is to be interpreted as including generic, bioequivalent and biosimilar versions of that drug, including but not limited to any drug that has received abbreviated regulatory approval by reference to an earlier regulatory approval of that drug.

Inflammatory Conditions or Diseases that Arise from a Tissue Originating from the Endoderm

[0266] The presently claimed devices can, e.g., provide for a higher concentration of α4β7 expressing cells in the periphery (e.g., blood) when an immune modulator is delivered topically to one or more parts of the GI tract distal to the stomach (e.g., the small or large intestine) as compared to when the same dose of the immune modulator is systemically administered. The presently claimed devices can, e.g., result in trafficked cells being forced out of the local gastrointestinal tissue (including the mucosa) and lymph system, and back into systemic circulation of a subject.

[0267] Accordingly, also provided herein are methods of treating a disease or condition that arises in a tissue originating from the endoderm. The endoderm forms the gastrointestinal tract, respiratory tract, endocrine glands, and organs, the auditory system and urinary system. Thus, the present invention includes compositions and devices for treating diseases and conditions found in the following tissues that originate from the endoderm (e.g., the stomach, the colon, the liver, the pancreas, the urinary bladder, the epithelial parts of the trachea, the lungs, the pharynx, the thyroid, the parathyroid, the intestines, and the gallbladder). Also provided herein are methods of treating a disease or a condition that arises in a tissue originating from the endoderm (e.g., any of the exemplary diseases or conditions that arise in a tissue originating from the endoderm described herein) that include intrathecally releasing one or more immune modulators in the small or large intestine using any of the devices or compositions described herein.

[0268] Non-limiting examples of a disease or condition that arises in a tissue originating from the endoderm includes gastritis, Celiac disease, hepatitis, alcoholic lever disease, fatty liver disease (hepatic steatosis), non-alcoholic fatty liver disease (NASH), cirrhosis, primary schlerosing cholangitis, pancreatitis, insterstitial cystitits, asthma, chronic obstructic pulmonary disease, pulmonary fibrosis, pharyngitis, thyroiditis, hyperthyroidism, parathyroiditis, nephritis, Hashimoto's disease, Addison's disease, Graves' disease, Sjögren syndrome, type 1 diabetes, pelvic inflammatory disease, auditory canal inflammation, tinnitus, vestibular neuritis, otitis media, auditory canal inflammation, tracheitis, cholestatic liver disease, primary biliary schlerosis, liver parenchyma, an inherited metabolic disorder of the liver, Byler syndrome, cerebrotendinous, xanthomatosis, Zellweger's syndrome, neonatal hepatitis, cystic fibrosis, ALGS (Alagilles syndrome), PFIC (progressive familial intrahepatic cholestasis), autoimmune hepatitis, primary biliary cirrhosis (PBC), liver fibrosis, NAFLD, portal hypertension, general cholestasis, such as in jaundice due to drugs or during pregnancy, intra- and extrahepatic cholestasis, such as hereditary forms of cholestasis, such as PFIC1, gall stones and choledocholithiasis, malignancy causing obstruction of the biliary tree, symptoms (scratching, pruritus) due to cholestasis/jaundice, chronic autoimmune liver disease leading to progressive cholestasis, and pruritus of cholestatic liver disease, duodenal ulcers, enteritis (radiation-, chemotherapy-, or infection-induced enteritis), diverticulitis, pouchitis, cholecystitis, and cholangitis. Additional examples of diseases and conditions that arise in a tissue originating from the endoderm are known in the are known in the art.

[0269] As used herein, the term “immune modulator” means a therapeutic agent that decreases the activation of an immune cell (e.g., a T cell, e.g., memory T cell), decreases the secretion or expression of a pro-inflammatory cytokine, decreases the recruitment or migration of T-lymphocytes (e.g., memory T lymphocytes), and/or increases the secretion or expression of an anti-inflammatory cytokine. Non-limiting examples of immune modulators are anti-inflammatory agents. Non-limiting examples of anti-inflammatory agents include IL-12/IL-23 inhibitors, TNFα inhibitors, IL-6 receptor inhibitors, immune modulatory agents (e.g., CD40/CD40L inhibitors), IL-1 inhibitors, IL-13 inhibitors, IL-10 receptor agonists, chemokine/chemokine receptor inhibitors, and integrin inhibitors. Non-limiting examples of integrin inhibitors include 137 integrin inhibitors, such as α4β7 integrin inhibitors. In some embodiments of any of the methods described herein, the immune modulator is a PDE4 inhibitor.

[0270] As used herein, the term “immune modulator” means a therapeutic agent that decreases the activation of an immune cell, decreases the secretion or expression of a pro-inflammatory cytokine, decreases the recruitment or migration of T-lymphocytes (e.g., memory T lymphocytes), and/or increases the secretion or expression of an anti-inflammatory cytokine. Non-limiting examples of immune modulators are anti-inflammatory agents. Non-limiting examples of anti-inflammatory agents include IL-12/IL-23 inhibitors, TNFα inhibitors, IL-6 receptor inhibitors, immune modulatory agents (e.g., CD40/CD40L inhibitors), IL-1 inhibitors, IL-13 inhibitors, IL-10 receptor agonists, chemokine/chemokine receptor inhibitors, and integrin inhibitors. In some embodiments of any of the methods described herein, the immune modulator is a PDE4 inhibitor. Additional examples of immune modulators useful for the treatment of a liver disease or disorder are described below.

[0271] Non-limiting exemplary examples of immune modulators are described below. Additional examples of immune modulators are known in the art.

### IL-12/IL-23 Inhibitors

[0272] The term “IL-12/IL-23 inhibitors” refers to an agent which decreases IL-12 or IL-23 expression and/or the ability of IL-12 to bind to an IL-12 receptor or the ability of IL-23 to bind to an IL-23 receptor. IL-12 is a heterodimeric cytokine that includes both IL-12A (p35) and IL-12B (p40) polypeptides. IL-23 is a heterodimeric cytokine that includes both IL-23 (p19) and IL-12B (p40) polypeptides. The receptor for IL-12 is a heterodimeric receptor includes IL-12R (31 and IL-12R (32. The receptor for IL-23 receptor is a heterodimeric receptor that includes both IL-12R (31 and IL-23R.

[0273] In some embodiments, the IL-12/IL-23 inhibitor can decrease the binding of IL-12 to the receptor for IL-12. In some embodiments, the IL-12/IL-23 inhibitor can decrease the binding of IL-23 to the receptor for IL-23. In some embodiments, the IL-12/IL-23 inhibitor decreases the expression of IL-12 or IL-23. In some embodiments, the IL-12/IL-23 inhibitor decreases the expression of a receptor for IL-12. In some embodiments, the IL-12/IL-23 inhibitor decreases the expression of a receptor for IL-23.

[0274] In some embodiments, the IL-12/IL-23 inhibitory agent targets IL-12B (p40) subunit. In some embodiments, the IL-12/IL-23 inhibitory agent targets IL-12A (p35). In some embodiments, the IL-12/IL-23 inhibitory agent targets IL-23 (p19). In some embodiments, the IL-12/IL-23 inhibitory agent targets the receptor for IL-12 (one or both of IL-12R β1 or IL-12R β2). In some embodiments, the IL-12/IL-23 inhibitory agent targets the receptor for IL-23 (one or both of IL-12R β1 and IL-23R).

[0275] In some embodiments, an IL-12/IL-23 inhibitor can be an inhibitory nucleic acid. In some embodiments, the inhibitory nucleic acid can be an antisense nucleic acid, a ribozyme, and a small interfering RNA (siRNA). Examples of aspects of these different oligonucleotides are described below. Any of the examples of inhibitory nucleic acids that can decrease expression of IL-12A (p35), IL-12B (p40), IL-23 (p19), IL-12R (31, IL-12R (32, or IL-23R mRNA in a mammalian cell can be synthesized in vitro.

[0276] Inhibitory nucleic acids that can decrease the expression of IL-12A (p35), IL-12B (p40), IL-23 (p19), IL-12R β1, IL-12R β2, or IL-23R mRNA expression in a mammalian cell include antisense nucleic acid molecules, i.e., nucleic acid molecules whose nucleotide sequence is complementary to all or part of an IL-12A (p35), IL-12B (p40), IL-23 (p19), IL-12R β1, IL-12R β2, or IL-23R mRNA (e.g., complementary to all or a part of any one of SEQ ID NOs: 1-12).

| Human IL-12A (p35) mRNA | |
|---|---|
| (SEQ ID NO: 1) | |
| 1 | tttcgctttc attttgggcc gagctggagg cggcggggcc gtcccggaac ggctgcggcc |
| 61 | gggcaccccg ggagttaatc cgaaagcgcc gcaagccccg cgggccggcc gcaccgcacg |
| 121 | tgtcaccgag aagctgatgt agagagagac acagaaggag acagaaagca agagaccaga |
| 181 | gtcccgggaa agtcctgccg cgcctcggga caattataaa aatgtggccc cctgggtcag |
| 241 | cctcccagcc accgccctca cctgccgcgg ccacaggtct gcatccagcg gctcgccctg |
| 301 | tgtccctgca gtgccggctc agcatgtgtc cagcgcgcag cctcctcctt gtggctaccc |
| 361 | tggtcctcct ggaccacctc agtttggcca gaaacctccc cgtggccact ccagacccag |
| 421 | gaatgttccc atgccttcac cactcccaaa acctgctgag ggccgtcagc aacatgctcc |
| 481 | agaaggccag acaaactcta gaattttacc cttgcacttc tgaagagatt gatcatgaag |
| 541 | atatcacaaa agataaaacc agcacagtgg aggcctgttt accattggaa ttaaccaaga |
| 601 | atgagagttg cctaaattcc agagagacct ctttcataac taatgggagt tgcctggcct |
| 661 | ccagaaagac ctcttttatg atggccctgt gccttagtag tatttatgaa gacttgaaga |
| 721 | tgtaccaggt ggagttcaag accatgaatg caaagcttct gatggatcct aagaggcaga |
| 781 | tctttctaga tcaaaacatg ctggcagtta ttgatgagct gatgcaggcc ctgaatttca |
| 841 | acagtgagac tgtgccacaa aaatcctccc ttgaagaacc ggatttttat aaaactaaaa |
| 901 | tcaagctctg catacttctt catgctttca gaattcgggc agtgactatt gatagagtga |
| 961 | tgagctatct gaatgcttcc taaaaagcga ggtccctcca aaccgttgtc atttttataa |
| 1021 | aactttgaaa tgaggaaact ttgataggat gtggattaag aactagggag ggggaaagaa |
| 1081 | ggatgggact attacatcca catgatacct ctgatcaagt atttttgaca tttactgtgg |
| 1141 | ataaattgtt tttaagtttt catgaatgaa ttgctaagaa gggaaaatat ccatcctgaa |
| 1201 | ggtgtttttc attcacttta atagaagggc aaatatttat aagctatttc tgtaccaaag |
| 1261 | tgtttgtgga aacaaacatg taagcataac ttattttaaa atatttattt atataacttg |
| 1321 | gtaatcatga aagcatctga gctaacttat atttatttat gttatattta ttaaattatt |
| 1381 | tatcaagtgt atttgaaaaa tatttttaag tgttctaaaa ataaaagtat tgaattaaag |
| 1441 | tgaaaaaaaa |
| Human IL-12B (p40) mRNA | |
| (SEQ ID NO: 2) | |
| 1 | ctgtttcagg gccattggac tctccgtcct gcccagagca agatgtgtca ccagcagttg |
| 61 | gtcatctctt ggttttccct ggtttttctg gcatctcccc tcgtggccat atgggaactg |
| 121 | aagaaagatg tttatgtcgt agaattggat tggtatccgg atgcccctgg agaaatggtg |
| 181 | gtcctcacct gtgacacccc tgaagaagat ggtatcacct ggaccttgga ccagagcagt |
| 241 | gaggtcttag gctctggcaa aaccctgacc atccaagtca aagagtttgg agatgctggc |
| 301 | cagtacacct gtcacaaagg aggcgaggtt ctaagccatt cgctcctgct gcttcacaaa |
| 361 | aaggaagatg gaatttggtc cactgatatt ttaaaggacc agaaagaacc caaaaataag |
| 421 | acctttctaa gatgcgaggc caagaattat tctggacgtt tcacctgctg gtggctgacg |
| 481 | acaatcagta ctgatttgac attcagtgtc aaaagcagca gaggctcttc tgacccccaa |
| 541 | ggggtgacgt gcggagctgc tacactctct gcagagagag tcagagggga caacaaggag |
| 601 | tatgagtact cagtggagtg ccaggaggac agtgcctgcc cagctgctga ggagagtctg |
| 661 | cccattgagg tcatggtgga tgccgttcac aagctcaagt atgaaaacta caccagcagc |
| 721 | ttcttcatca gggacatcat caaacctgac ccacccaaga acttgcagct gaagccatta |
| 781 | aagaattctc ggcaggtgga ggtcagctgg gagtaccctg acacctggag tactccacat |
| 841 | tcctacttct ccctgacatt ctgcgttcag gtccagggca agagcaagag agaaaagaaa |
| 901 | gatagagtct tcacggacaa gacctcagcc acggtcatct gccgcaaaaa tgccagcatt |
| 961 | agcgtgcggg cccaggaccg ctactatagc tcatcttgga gcgaatgggc atctgtgccc |
| 1021 | tgcagttagg ttctgatcca ggatgaaaat ttggaggaaa agtggaagat attaagcaaa |
| 1081 | atgtttaaag acacaacgga atagacccaa aaagataatt tctatctgat ttgctttaaa |
| 1141 | acgttttttt aggatcacaa tgatatcttt gctgtatttg tatagttaga tgctaaatgc |
| 1201 | tcattgaaac aatcagctaa tttatgtata gattttccag ctctcaagtt gccatgggcc |
| 1261 | ttcatgctat ttaaatattt aagtaattta tgtatttatt agtatattac tgttatttaa |
| 1321 | cgtttgtctg ccaggatgta tggaatgttt catactctta tgacctgatc catcaggatc |
| 1381 | agtccctatt atgcaaaatg tgaatttaat tttatttgta ctgacaactt ttcaagcaag |
| 1441 | gctgcaagta catcagtttt atgacaatca ggaagaatgc agtgttctga taccagtgcc |
| 1501 | atcatacact tgtgatggat gggaacgcaa gagatactta catggaaacc tgacaatgca |
| 1561 | aacctgttga gaagatccag gagaacaaga tgctagttcc catgtctgtg aagacttcct |
| 1621 | ggagatggtg ttgataaagc aatttagggc cacttacact tctaagcaag tttaatcttt |
| 1681 | ggatgcctga attttaaaag ggctagaaaa aaatgattga ccagcctggg aaacataaca |
| 1741 | agaccccgtc tctacaaaaa aaatttaaaa ttagccaggc gtggtggctc atgcttgtgg |
| 1801 | tcccagctgt tcaggaggat gaggcaggag gatctcttga gcccaggagg tcaaggctat |
| 1861 | ggtgagccgt gattgtgcca ctgcatacca gcctaggtga cagaatgaga ccctgtctca |
| 1921 | aaaaaaaaaa tgattgaaat taaaattcag ctttagcttc catggcagtc ctcaccccca |
| 1981 | cctctctaaa agacacagga ggatgacaca gaaacaccgt aagtgtctgg aaggcaaaaa |
| 2041 | gatcttaaga ttcaagagag aggacaagta gttatggcta aggacatgaa attgtcagaa |
| 2101 | tggcaggtgg cttcttaaca gccctgtgag aagcagacag atgcaaagaa aatctggaat |
| 2161 | ccctttctca ttagcatgaa tgaacctgat acacaattat gaccagaaaa tatggctcca |
| 2221 | tgaaggtgct acttttaagt aatgtatgtg cgctctgtaa agtgattaca tttgtttcct |
| 2281 | gtttgtttat ttatttattt atttttgcat tctgaggctg aactaataaa aactcttctt |
| 2341 | tgtaatc |
| Human IL-23 (p19) mRNA | |
| (SEQ ID NO: 3) | |
| 1 | aaaacaacag gaagcagctt acaaactcgg tgaacaactg agggaaccaa accagagacg |
| 61 | cgctgaacag agagaatcag gctcaaagca agtggaagtg ggcagagatt ccaccaggac |
| 121 | tggtgcaagg cgcagagcca gccagatttg agaagaaggc aaaaagatgc tggggagcag |
| 181 | agctgtaatg ctgctgttgc tgctgccctg gacagctcag ggcagagctg tgcctggggg |
| 241 | cagcagccct gcctggactc agtgccagca gctttcacag aagctctgca cactggcctg |
| 301 | gagtgcacat ccactagtgg gacacatgga tctaagagaa gagggagatg aagagactac |
| 361 | aaatgatgtt ccccatatcc agtgtggaga tggctgtgac ccccaaggac tcagggacaa |
| 421 | cagtcagttc tgcttgcaaa ggatccacca gggtctgatt ttttatgaga agctgctagg |
| 481 | atcggatatt ttcacagggg agccttctct gctccctgat agccctgtgg gccagcttca |
| 541 | tgcctcccta ctgggcctca gccaactcct gcagcctgag ggtcaccact gggagactca |
| 601 | gcagattcca agcctcagtc ccagccagcc atggcagcgt ctccttctcc gcttcaaaat |
| 661 | ccttcgcagc ctccaggcct ttgtggctgt agccgcccgg gtctttgccc atggagcagc |
| 721 | aaccctgagt ccctaaaggc agcagctcaa ggatggcact cagatctcca tggcccagca |
| 781 | aggccaagat aaatctacca ccccaggcac ctgtgagcca acaggttaat tagtccatta |
| 841 | attttagtgg gacctgcata tgttgaaaat taccaatact gactgacatg tgatgctgac |
| 901 | ctatgataag gttgagtatt tattagatgg gaagggaaat ttggggatta tttatcctcc |
| 961 | tggggacagt ttggggagga ttatttattg tatttatatt gaattatgta cttttttcaa |
| 1021 | taaagtctta tttttgtggc taaaaaaaa |
| Human IL-12R β1 mRNA Variant 1 | |
| (SEQ ID NO: 4) | |
| 1 | ctctttcact ttgacttgcc ttagggatgg gctgtgacac tttacttttt ttcttttttc |
| 61 | ttttttttca gtcttttctc cttgctcagc ttcaatgtgt tccggagtgg ggacggggtg |
| 121 | gctgaacctc gcaggtggca gagaggctcc cctggggctg tggggctcta cgtggatccg |
| 181 | atggagccgc tggtgacctg ggtggtcccc ctcctcttcc tcttcctgct gtccaggcag |
| 241 | ggcgctgcct gcagaaccag tgagtgctgt tttcaggacc cgccatatcc ggatgcagac |
| 301 | tcaggctcgg cctcgggccc tagggacctg agatgctatc ggatatccag tgatcgttac |
| 361 | gagtgctcct ggcagtatga gggtcccaca gctggggtca gccacttcct gcggtgttgc |
| 421 | cttagctccg ggcgctgctg ctacttcgcc gccggctcag ccaccaggct gcagttctcc |
| 481 | gaccaggctg gggtgtctgt gctgtacact gtcacactct gggtggaatc ctgggccagg |
| 541 | aaccagacag agaagtctcc tgaggtgacc ctgcagctct acaactcagt taaatatgag |
| 601 | cctcctctgg gagacatcaa ggtgtccaag ttggccgggc agctgcgtat ggagtgggag |
| 661 | accccggata accaggttgg tgctgaggtg cagttccggc accggacacc cagcagccca |
| 721 | tggaagttgg gcgactgcgg acctcaggat gatgatactg agtcctgcct ctgccccctg |
| 781 | gagatgaatg tggcccagga attccagctc cgacgacggc agctggggag ccaaggaagt |
| 841 | tcctggagca agtggagcag ccccgtgtgc gttccccctg aaaacccccc acagcctcag |
| 901 | gtgagattct cggtggagca gctgggccag gatgggagga ggcggctgac cctgaaagag |
| 961 | cagccaaccc agctggagct tccagaaggc tgtcaagggc tggcgcctgg cacggaggtc |
| 1021 | acttaccgac tacagctcca catgctgtcc tgcccgtgta aggccaaggc caccaggacc |
| 1081 | ctgcacctgg ggaagatgcc ctatctctcg ggtgctgcct acaacgtggc tgtcatctcc |
| 1141 | tcgaaccaat ttggtcctgg cctgaaccag acgtggcaca ttcctgccga cacccacaca |
| 1201 | gaaccagtgg ctctgaatat cagcgtcgga accaacggga ccaccatgta ttggccagcc |
| 1261 | cgggctcaga gcatgacgta ttgcattgaa tggcagcctg tgggccagga cgggggcctt |
| 1321 | gccacctgca gcctgactgc gccgcaagac ccggatccgg ctggaatggc aacctacagc |
| 1381 | tggagtcgag agtctggggc aatggggcag gaaaagtgtt actacattac catctttgcc |
| 1441 | tctgcgcacc ccgagaagct caccttgtgg tctacggtcc tgtccaccta ccactttggg |
| 1501 | ggcaatgcct cagcagctgg gacaccgcac cacgtctcgg tgaagaatca tagcttggac |
| 1561 | tctgtgtctg tggactgggc accatccctg ctgagcacct gtcccggcgt cctaaaggag |
| 1621 | tatgttgtcc gctgccgaga tgaagacagc aaacaggtgt cagagcatcc cgtgcagccc |
| 1681 | acagagaccc aagttaccct cagtggcctg cgggctggtg tagcctacac ggtgcaggtg |
| 1741 | cgagcagaca cagcgtggct gaggggtgtc tggagccagc cccagcgctt cagcatcgaa |
| 1801 | gtgcaggttt ctgattggct catcttcttc gcctccctgg ggagcttcct gagcatcctt |
| 1861 | ctcgtgggcg tccttggcta ccttggcctg aacagggccg cacggcacct gtgcccgccg |
| 1921 | ctgcccacac cctgtgccag ctccgccatt gagttccctg gagggaagga gacttggcag |
| 1981 | tggatcaacc cagtggactt ccaggaagag gcatccctgc aggaggccct ggtggtagag |
| 2041 | atgtcctggg acaaaggcga gaggactgag cctctcgaga agacagagct acctgagggt |
| 2101 | gcccctgagc tggccctgga tacagagttg tccttggagg atggagacag gtgcaaggcc |
| 2161 | aagatgtgat cgttgaggct cagagagggt gagtgactcg cccgaggcta cgtagcacac |
| 2221 | acaggagtca catttggacc caaataaccc agagctcctc caggctccag tgcacctgcc |
| 2281 | tcctctctgc cccgtgcctg ttgccaccca tcctgcgggg gaaccctaga tgctgccatg |
| 2341 | aaatggaagc tgctgcaccc tgctgggcct ggcatccgtg gggcaggagc agaccctgcc |
| 2401 | atttacctgt tctggcgtag aatggactgg gaatgggggc aaggggggct cagatggatc |
| 2461 | cctggaccct gggctgggca tccaccccca ggagcactgg atggggagtc tggactcaag |
| 2521 | ggctccctgc agcattgcgg ggtcttgtag cttggaggat ccaggcatat agggaagggg |
| 2581 | gctgtaaact ttgtgggaaa aatgacggtc ctcccatccc accccccacc ccaccctcac |
| 2641 | ccccctataa aatgggggtg gtgataatga ccttacacag ctgttcaaaa tcatcgtaaa |
| 2701 | tgagcctcct cttgggtatt tttttcctgt ttgaagcttg aatgtcctgc tcaaaatctc |
| 2761 | aaaacacgag ccttggaatt caaaaaaaaa aaaaaaaaaa |
| Human IL-12R β1 mRNA Variant 2 | |
| (SEQ ID NO: 5) | |
| 1 | ctctttcact ttgacttgcc ttagggatgg gctgtgacac tttacttttt ttcttttttc |
| 61 | ttttttttca gtcttttctc cttgctcagc ttcaatgtgt tccggagtgg ggacggggtg |
| 121 | gctgaacctc gcaggtggca gagaggctcc cctggggctg tggggctcta cgtggatccg |
| 181 | atggagccgc tggtgacctg ggtggtcccc ctcctcttcc tcttcctgct gtccaggcag |
| 241 | ggcgctgcct gcagaaccag tgagtgctgt tttcaggacc cgccatatcc ggatgcagac |
| 301 | tcaggctcgg cctcgggccc tagggacctg agatgctatc ggatatccag tgatcgttac |
| 361 | gagtgctcct ggcagtatga gggtcccaca gctggggtca gccacttcct gcggtgttgc |
| 421 | cttagctccg ggcgctgctg ctacttcgcc gccggctcag ccaccaggct gcagttctcc |
| 481 | gaccaggctg gggtgtctgt gctgtacact gtcacactct gggtggaatc ctgggccagg |
| 541 | aaccagacag agaagtctcc tgaggtgacc ctgcagctct acaactcagt taaatatgag |
| 601 | cctcctctgg gagacatcaa ggtgtccaag ttggccgggc agctgcgtat ggagtgggag |
| 661 | accccggata accaggttgg tgctgaggtg cagttccggc accggacacc cagcagccca |
| 721 | tggaagttgg gcgactgcgg acctcaggat gatgatactg agtcctgcct ctgccccctg |
| 781 | gagatgaatg tggcccagga attccagctc cgacgacggc agctggggag ccaaggaagt |
| 841 | tcctggagca agtggagcag ccccgtgtgc gttccccctg aaaacccccc acagcctcag |
| 901 | gtgagattct cggtggagca gctgggccag gatgggagga ggcggctgac cctgaaagag |
| 961 | cagccaaccc agctggagct tccagaaggc tgtcaagggc tggcgcctgg cacggaggtc |
| 1021 | acttaccgac tacagctcca catgctgtcc tgcccgtgta aggccaaggc caccaggacc |
| 1081 | ctgcacctgg ggaagatgcc ctatctctcg ggtgctgcct acaacgtggc tgtcatctcc |
| 1141 | tcgaaccaat ttggtcctgg cctgaaccag acgtggcaca ttcctgccga cacccacaca |
| 1201 | gatggcatga tctcagctca ctgcaacctc cgccttccag attcaagaga ttctcctgct |
| 1261 | tcagcctccc gagtagctgg gattacaggc atctgccacc atacccggct aattttgtat |
| 1321 | ttttagtaga gacggggttt caccacgttg gccaggctgg tctcgaactc ctgacctcaa |
| 1381 | gtgatccacc tgccttggcc tcccaaagtg ttgggattat aggcgtgagc caccatgccc |
| 1441 | agcctaattt ttgtattttt agtagagatg gagtttcacc atgttgccca ggctggtctc |
| 1501 | aaactcctgc cctcaggtga tccacccacc tcagcctctc aaagtgctgg gattacaggt |
| 1561 | gtgagccact gtggccgacc tactattttt attatttttg agctaggttc tcagtctgtt |
| 1621 | ggcagactgg agtgcaatca tggctcactg cagccttgaa ctcccagact caagtgatcc |
| 1681 | ttccacctca gcctctggag tagctgggac tacagacatg caccaccaca cctggttaat |
| 1741 | tttttatttt tattttttgt agagacaggt gtctctctac gttgcccagg ctggtctcga |
| 1801 | actcctgggc tcaagtgatc cacccatctc cacctcccaa agtgctagga ttacaggcgt |
| 1861 | gagccaccgt acccagcctg gtcccatatc atagtgaaat ggtgcctgta aagctctcag |
| 1921 | cattggcttg gcacatgcag ttggtactca ataaacggct gttgctatcc ccaaaaaaaa |
| 1981 | aaaaaaaaaa aaaaaaa |
| Human IL-12R β1 mRNA Variant 3 | |
| (SEQ ID NO: 6) | |
| 1 | ctctttcact ttgacttgcc ttagggatgg gctgtgacac tttacttttt ttcttttttc |
| 61 | ttttttttca gtcttttctc cttgctcagc ttcaatgtgt tccggagtgg ggacggggtg |
| 121 | gctgaacctc gcaggtggca gagaggctcc cctggggctg tggggctcta cgtggatccg |
| 181 | atggagccgc tggtgacctg ggtggtcccc ctcctcttcc tcttcctgct gtccaggcag |
| 241 | ggcgctgcct gcagaaccag tgagtgctgt tttcaggacc cgccatatcc ggatgcagac |
| 301 | tcaggctcgg cctcgggccc tagggacctg agatgctatc ggatatccag tgatcgttac |
| 361 | gagtgctcct ggcagtatga gggtcccaca gctggggtca gccacttcct gcggtgttgc |
| 421 | cttagctccg ggcgctgctg ctacttcgcc gccggctcag ccaccaggct gcagttctcc |
| 481 | gaccaggctg gggtgtctgt gctgtacact gtcacactct gggtggaatc ctgggccagg |
| 541 | aaccagacag agaagtctcc tgaggtgacc ctgcagctct acaactcagt taaatatgag |
| 601 | cctcctctgg gagacatcaa ggtgtccaag ttggccgggc agctgcgtat ggagtgggag |
| 661 | accccggata accaggttgg tgctgaggtg cagttccggc accggacacc cagcagccca |
| 721 | tggaagttgg gcgactgcgg acctcaggat gatgatactg agtcctgcct ctgccccctg |
| 781 | gagatgaatg tggcccagga attccagctc cgacgacggc agctggggag ccaaggaagt |
| 841 | tcctggagca agtggagcag ccccgtgtgc gttccccctg aaaacccccc acagcctcag |
| 901 | gtgagattct cggtggagca gctgggccag gatgggagga ggcggctgac cctgaaagag |
| 961 | cagccaaccc agctggagct tccagaaggc tgtcaagggc tggcgcctgg cacggaggtc |
| 1021 | acttaccgac tacagctcca catgctgtcc tgcccgtgta aggccaaggc caccaggacc |
| 1081 | ctgcacctgg ggaagatgcc ctatctctcg ggtgctgcct acaacgtggc tgtcatctcc |
| 1141 | tcgaaccaat ttggtcctgg cctgaaccag acgtggcaca ttcctgccga cacccacaca |
| 1201 | gaaccagtgg ctctgaatat cagcgtcgga accaacggga ccaccatgta ttggccagcc |
| 1261 | cgggctcaga gcatgacgta ttgcattgaa tggcagcctg tgggccagga cgggggcctt |
| 1321 | gccacctgca gcctgactgc gccgcaagac ccggatccgg ctggaatggc aacctacagc |
| 1381 | tggagtcgag agtctggggc aatggggcag gaaaagtgtt actacattac catctttgcc |
| 1441 | tctgcgcacc ccgagaagct caccttgtgg tctacggtcc tgtccaccta ccactttggg |
| 1501 | ggcaatgcct cagcagctgg gacaccgcac cacgtctcgg tgaagaatca tagcttggac |
| 1561 | tctgtgtctg tggactgggc accatccctg ctgagcacct gtcccggcgt cctaaaggag |
| 1621 | tatgttgtcc gctgccgaga tgaagacagc aaacaggtgt cagagcatcc cgtgcagccc |
| 1681 | acagagaccc aagttaccct cagtggcctg cgggctggtg tagcctacac ggtgcaggtg |
| 1741 | cgagcagaca cagcgtggct gaggggtgtc tggagccagc cccagcgctt cagcatcgaa |
| 1801 | gtgcaggttt ctgattggct catcttcttc gcctccctgg ggagcttcct gagcatcctt |
| 1861 | ctcgtgggcg tccttggcta ccttggcctg aacagggccg cacggcacct gtgcccgccg |
| 1921 | ctgcccacac cctgtgccag ctccgccatt gagttccctg gagggaagga gacttggcag |
| 1981 | tggatcaacc cagtggactt ccaggaagag gcatccctgc aggaggccct ggtggtagag |
| 2041 | atgtcctggg acaaaggcga gaggactgag cctctcgaga agacagagct acctgagggt |
| 2101 | gcccctgagc tggccctgga tacagagttg tccttggagg atggagacag atgtgatcgt |
| 2161 | tgaggctcag agagggtgag tgactcgccc gaggctacgt agcacacaca ggagtcacat |
| 2221 | ttggacccaa ataacccaga gctcctccag gctccagtgc acctgcctcc tctctgcccc |
| 2281 | gtgcctgttg ccacccatcc tgcgggggaa ccctagatgc tgccatgaaa tggaagctgc |
| 2341 | tgcaccctgc tgggcctggc atccgtgggg caggagcaga ccctgccatt tacctgttct |
| 2401 | ggcgtagaat ggactgggaa tgggggcaag gggggctcag atggatccct ggaccctggg |
| 2461 | ctgggcatcc acccccagga gcactggatg gggagtctgg actcaagggc tccctgcagc |
| 2521 | attgcggggt cttgtagctt ggaggatcca ggcatatagg gaagggggct gtaaactttg |
| 2581 | tgggaaaaat gacggtcctc ccatcccacc ccccacccca ccctcacccc cctataaaat |
| 2641 | gggggtggtg ataatgacct tacacagctg ttcaaaatca tcgtaaatga gcctcctctt |
| 2701 | gggtattttt ttcctgtttg aagcttgaat gtcctgctca aaatctcaaa acacgagcct |
| 2761 | tggaattcaa aaaaaaaaaa aaaaaaa |
| Human IL-12R β1 mRNA Variant 4 | |
| (SEQ ID NO: 7) | |
| 1 | agaacactcc gctgcctctc cagagccagg cacacagcag gcgctccata aatgttcgtt |
| 61 | ggtcttttct ccttgctcag cttcaatgtg ttccggagtg gggacggggt ggctgaacct |
| 121 | cgcaggtggc agagaggctc ccctggggct gtggggctct acgtggatcc gatggagccg |
| 181 | ctggtgacct gggtggtccc cctcctcttc ctcttcctgc tgtccaggca gggcgctgcc |
| 241 | tgcagaacca gtgagtgctg ttttcaggac ccgccatatc cggatgcaga ctcaggctcg |
| 301 | gcctcgggcc ctagggacct gagatgctat cggatatcca gtgatcgtta cgagtgctcc |
| 361 | tggcagtatg agggtcccac agctggggtc agccacttcc tgcggtgttg ccttagctcc |
| 421 | gggcgctgct gctacttcgc cgccggctca gccaccaggc tgcagttctc cgaccaggct |
| 481 | ggggtgtctg tgctgtacac tgtcacactc tgggtggaat cctgggccag gaaccagaca |
| 541 | gagaagtctc ctgaggtgac cctgcagctc tacaactcag ttaaatatga gcctcctctg |
| 601 | ggagacatca aggtgtccaa gttggccggg cagctgcgta tggagtggga gaccccggat |
| 661 | aaccaggttg gtgctgaggt gcagttccgg caccggacac ccagcagccc atggaagttg |
| 721 | ggcgactgcg gacctcagga tgatgatact gagtcctgcc tctgccccct ggagatgaat |
| 781 | gtggcccagg aattccagct ccgacgacgg cagctgggga gccaaggaag ttcctggagc |
| 841 | aagtggagca gccccgtgtg cgttccccct gaaaaccccc cacagcctca ggtgagattc |
| 901 | tcggtggagc agctgggcca ggatgggagg aggcggctga ccctgaaaga gcagccaacc |
| 961 | cagctggagc ttccagaagg ctgtcaaggg ctggcgcctg gcacggaggt cacttaccga |
| 1021 | ctacagctcc acatgctgtc ctgcccgtgt aaggccaagg ccaccaggac cctgcacctg |
| 1081 | gggaagatgc cctatctctc gggtgctgcc tacaacgtgg ctgtcatctc ctcgaaccaa |
| 1141 | tttggtcctg gcctgaacca gacgtggcac attcctgccg acacccacac agaaccagtg |
| 1201 | gctctgaata tcagcgtcgg aaccaacggg accaccatgt attggccagc ccgggctcag |
| 1261 | agcatgacgt attgcattga atggcagcct gtgggccagg acgggggcct tgccacctgc |
| 1321 | agcctgactg cgccgcaaga cccggatccg gctggaatgg caacctacag ctggagtcga |
| 1381 | gagtctgggg caatggggca ggaaaagtgt tactacatta ccatctttgc ctctgcgcac |
| 1441 | cccgagaagc tcaccttgtg gtctacggtc ctgtccacct accactttgg gggcaatgcc |
| 1501 | tcagcagctg ggacaccgca ccacgtctcg gtgaagaatc atagcttgga ctctgtgtct |
| 1561 | gtggactggg caccatccct gctgagcacc tgtcccggcg tcctaaagga gtatgttgtc |
| 1621 | cgctgccgag atgaagacag caaacaggtg tcagagcatc ccgtgcagcc cacagagacc |
| 1681 | caagttaccc tcagtggcct gcgggctggt gtagcctaca cggtgcaggt gcgagcagac |
| 1741 | acagcgtggc tgaggggtgt ctggagccag ccccagcgct tcagcatcga agtgcaggtt |
| 1801 | tctgattggc tcatcttctt cgcctccctg gggagcttcc tgagcatcct tctcgtgggc |
| 1861 | gtccttggct accttggcct gaacagggcc gcacggcacc tgtgcccgcc gctgcccaca |
| 1921 | ccctgtgcca gctccgccat tgagttccct ggagggaagg agacttggca gtggatcaac |
| 1981 | ccagtggact tccaggaaga ggcatccctg caggaggccc tggtggtaga gatgtcctgg |
| 2041 | gacaaaggcg agaggactga gcctctcgag aagacagagc tacctgaggg tgcccctgag |
| 2101 | ctggccctgg atacagagtt gtccttggag gatggagaca ggtgcaaggc caagatgtga |
| 2161 | tcgttgaggc tcagagaggg tgagtgactc gcccgaggct acgtagcaca cacaggagtc |
| 2221 | acatttggac ccaaataacc cagagctcct ccaggctcca gtgcacctgc ctcctctctg |
| 2281 | ccccgtgcct gttgccaccc atcctgcggg ggaaccctag atgctgccat gaaatggaag |
| 2341 | ctgctgcacc ctgctgggcc tggcatccgt ggggcaggag cagaccctgc catttacctg |
| 2401 | ttctggcgta gaatggactg ggaatggggg caaggggggc tcagatggat ccctggaccc |
| 2461 | tgggctgggc atccaccccc aggagcactg gatggggagt ctggactcaa gggctccctg |
| 2521 | cagcattgcg gggtcttgta gcttggagga tccaggcata tagggaaggg ggctgtaaac |
| 2581 | tttgtgggaa aaatgacggt cctcccatcc caccccccac cccaccctca cccccctata |
| 2641 | aaatgggggt ggtgataatg accttacaca gctgttcaaa atcatcgtaa atgagcctcc |
| 2701 | tcttgggtat ttttttcctg tttgaagctt gaatgtcctg ctcaaaatct caaaacacga |
| 2761 | gccttggaat tcaaaaaaaa aaaaaaaaaa a |
| Human IL-12R β2 mRNA Variant 1 | |
| (SEQ ID NO: 8) | |
| 1 | tgcagagcac agagaaagga catctgcgag gaaagttccc tgatggctgt caacaaagtg |
| 61 | ccacgtctct atggctgtga acgctgagca cacgatttta tcgcgcctat catatcttgg |
| 121 | tgcataaacg cacctcacct cggtcaaccc ttgctccgtc ttatgagaca ggctttatta |
| 181 | tccgcatttt atatgagggg aaactgacgg tggagagaga attatcttgc tcaaggcgac |
| 241 | acagcagagc ccacaggtgg cagaatccca cccgagcccg cttcgacccg cggggtggaa |
| 301 | accacgggcg cccgcccggc tgcgcttcca gagctgaact gagaagcgag tcctctccgc |
| 361 | cctgcggcca ccgcccagcc ccgacccccg ccccggcccg atcctcactc gccgccagct |
| 421 | ccccgcgccc accccggagt tggtggcgca gaggcgggag gcggaggcgg gagggcgggc |
| 481 | gctggcaccg ggaacgcccg agcgccggca gagagcgcgg agagcgcgac acgtgcggcc |
| 541 | cagagcaccg gggccacccg gtccccgcag gcccgggacc gcgcccgctg gcaggcgaca |
| 601 | cgtggaagaa tacggagttc tataccagag ttgattgttg atggcacata cttttagagg |
| 661 | atgctcattg gcatttatgt ttataatcac gtggctgttg attaaagcaa aaatagatgc |
| 721 | gtgcaagaga ggcgatgtga ctgtgaagcc ttcccatgta attttacttg gatccactgt |
| 781 | caatattaca tgctctttga agcccagaca aggctgcttt cactattcca gacgtaacaa |
| 841 | gttaatcctg tacaagtttg acagaagaat caattttcac catggccact ccctcaattc |
| 901 | tcaagtcaca ggtcttcccc ttggtacaac cttgtttgtc tgcaaactgg cctgtatcaa |
| 961 | tagtgatgaa attcaaatat gtggagcaga gatcttcgtt ggtgttgctc cagaacagcc |
| 1021 | tcaaaattta tcctgcatac agaagggaga acaggggact gtggcctgca cctgggaaag |
| 1081 | aggacgagac acccacttat acactgagta tactctacag ctaagtggac caaaaaattt |
| 1141 | aacctggcag aagcaatgta aagacattta ttgtgactat ttggactttg gaatcaacct |
| 1201 | cacccctgaa tcacctgaat ccaatttcac agccaaggtt actgctgtca atagtcttgg |
| 1261 | aagctcctct tcacttccat ccacattcac attcttggac atagtgaggc ctcttcctcc |
| 1321 | gtgggacatt agaatcaaat ttcaaaaggc ttctgtgagc agatgtaccc tttattggag |
| 1381 | agatgaggga ctggtactgc ttaatcgact cagatatcgg cccagtaaca gcaggctctg |
| 1441 | gaatatggtt aatgttacaa aggccaaagg aagacatgat ttgctggatc tgaaaccatt |
| 1501 | tacagaatat gaatttcaga tttcctctaa gctacatctt tataagggaa gttggagtga |
| 1561 | ttggagtgaa tcattgagag cacaaacacc agaagaagag cctactggga tgttagatgt |
| 1621 | ctggtacatg aaacggcaca ttgactacag tagacaacag atttctcttt tctggaagaa |
| 1681 | tctgagtgtc tcagaggcaa gaggaaaaat tctccactat caggtgacct tgcaggagct |
| 1741 | gacaggaggg aaagccatga cacagaacat cacaggacac acctcctgga ccacagtcat |
| 1801 | tcctagaacc ggaaattggg ctgtggctgt gtctgcagca aattcaaaag gcagttctct |
| 1861 | gcccactcgt attaacataa tgaacctgtg tgaggcaggg ttgctggctc ctcgccaggt |
| 1921 | ctctgcaaac tcagagggca tggacaacat tctggtgact tggcagcctc ccaggaaaga |
| 1981 | tccctctgct gttcaggagt acgtggtgga atggagagag ctccatccag ggggtgacac |
| 2041 | acaggtccct ctaaactggc tacggagtcg accctacaat gtgtctgctc tgatttcaga |
| 2101 | gaacataaaa tcctacatct gttatgaaat ccgtgtgtat gcactctcag gggatcaagg |
| 2161 | aggatgcagc tccatcctgg gtaactctaa gcacaaagca ccactgagtg gcccccacat |
| 2221 | taatgccatc acagaggaaa aggggagcat tttaatttca tggaacagca ttccagtcca |
| 2281 | ggagcaaatg ggctgcctcc tccattatag gatatactgg aaggaacggg actccaactc |
| 2341 | ccagcctcag ctctgtgaaa ttccctacag agtctcccaa aattcacatc caataaacag |
| 2401 | cctgcagccc cgagtgacat atgtcctgtg gatgacagct ctgacagctg ctggtgaaag |
| 2461 | ttcccacgga aatgagaggg aattttgtct gcaaggtaaa gccaattgga tggcgtttgt |
| 2521 | ggcaccaagc atttgcattg ctatcatcat ggtgggcatt ttctcaacgc attacttcca |
| 2581 | gcaaaaggtg tttgttctcc tagcagccct cagacctcag tggtgtagca gagaaattcc |
| 2641 | agatccagca aatagcactt gcgctaagaa atatcccatt gcagaggaga agacacagct |
| 2701 | gcccttggac aggctcctga tagactggcc cacgcctgaa gatcctgaac cgctggtcat |
| 2761 | cagtgaagtc cttcatcaag tgaccccagt tttcagacat cccccctgct ccaactggcc |
| 2821 | acaaagggaa aaaggaatcc aaggtcatca ggcctctgag aaagacatga tgcacagtgc |
| 2881 | ctcaagccca ccacctccaa gagctctcca agctgagagc agacaactgg tggatctgta |
| 2941 | caaggtgctg gagagcaggg gctccgaccc aaagcccgaa aacccagcct gtccctggac |
| 3001 | ggtgctccca gcaggtgacc ttcccaccca tgatggctac ttaccctcca acatagatga |
| 3061 | cctcccctca catgaggcac ctctcgctga ctctctggaa gaactggagc ctcagcacat |
| 3121 | ctccctttct gttttcccct caagttctct tcacccactc accttctcct gtggtgataa |
| 3181 | gctgactctg gatcagttaa agatgaggtg tgactccctc atgctctgag tggtgaggct |
| 3241 | tcaagcctta aagtcagtgt gccctcaacc agcacagcct gccccaattc ccccagcccc |
| 3301 | tgctccagca gctgtcatct ctgggtgcca ccatcggtct ggctgcagct agaggacagg |
| 3361 | caagccagct ctgggggagt cttaggaact gggagttggt cttcactcag atgcctcatc |
| 3421 | ttgcctttcc cagggcctta aaattacatc cttcactgtg tggacctaga gactccaact |
| 3481 | tgaattccta gtaactttct tggtatgctg gccagaaagg gaaatgagga ggagagtaga |
| 3541 | aaccacagct cttagtagta atggcataca gtctagagga ccattcatgc aatgactatt |
| 3601 | tctaaagcac ctgctacaca gcaggctgta cacagcagat cagtactgtt caacagaact |
| 3661 | tcctgagatg atggaaatgt tctacctctg cactcactgt ccagtacatt agacactagg |
| 3721 | cacattggct gttaatcact tggaatgtgt ttagcttgac tgaggaatta aattttgatt |
| 3781 | gtaaatttaa atcgccacac atggctagtg gctactgtat tggagtgcac agctctagat |
| 3841 | ggctcctaga ttattgagag ccttcaaaac aaatcaacct agttctatag atgaagacat |
| 3901 | aaaagacact ggtaaacacc aaggtaaaag ggcccccaag gtggtcatga ctggtctcat |
| 3961 | ttgcagaagt ctaagaatgt acctttttct ggccgggcgt ggtagctcat gcctgtaatc |
| 4021 | ccagcacttt gggaggctga |
| Human IL-12R β2 mRNA Variant 2 | |
| (SEQ ID NO: 9) | |
| 1 | tgcagagcac agagaaagga catctgcgag gaaagttccc tgatggctgt caacaaagtg |
| 61 | ccacgtctct atggctgtga acgctgagca cacgatttta tcgcgcctat catatcttgg |
| 121 | tgcataaacg cacctcacct cggtcaaccc ttgctccgtc ttatgagaca ggctttatta |
| 181 | tccgcatttt atatgagggg aaactgacgg tggagagaga attatcttgc tcaaggcgac |
| 241 | acagcagagc ccacaggtgg cagaatccca cccgagcccg cttcgacccg cggggtggaa |
| 301 | accacgggcg cccgcccggc tgcgcttcca gagctgaact gagaagcgag tcctctccgc |
| 361 | cctgcggcca ccgcccagcc ccgacccccg ccccggcccg atcctcactc gccgccagct |
| 421 | ccccgcgccc accccggagt tggtggcgca gaggcgggag gcggaggcgg gagggcgggc |
| 481 | gctggcaccg ggaacgcccg agcgccggca gagagcgcgg agagcgcgac acgtgcggcc |
| 541 | cagagcaccg gggccacccg gtccccgcag gcccgggacc gcgcccgctg gcaggcgaca |
| 601 | cgtggtcacg gtgatccatt tgtaaagtcg ggaataaatg acctctgaag tgttgtctgt |
| 661 | atattgatct gctaccagta aaacatatct ctgaagaata cggagttcta taccagagtt |
| 721 | gattgttgat ggcacatact tttagaggat gctcattggc atttatgttt ataatcacgt |
| 781 | ggctgttgat taaagcaaaa atagatgcgt gcaagagagg cgatgtgact gtgaagcctt |
| 841 | cccatgtaat tttacttgga tccactgtca atattacatg ctctttgaag cccagacaag |
| 901 | gctgctttca ctattccaga cgtaacaagt taatcctgta caagtttgac agaagaatca |
| 961 | attttcacca tggccactcc ctcaattctc aagtcacagg tcttcccctt ggtacaacct |
| 1021 | tgtttgtctg caaactggcc tgtatcaata gtgatgaaat tcaaatatgt ggagcagaga |
| 1081 | tcttcgttgg tgttgctcca gaacagcctc aaaatttatc ctgcatacag aagggagaac |
| 1141 | aggggactgt ggcctgcacc tgggaaagag gacgagacac ccacttatac actgagtata |
| 1201 | ctctacagct aagtggacca aaaaatttaa cctggcagaa gcaatgtaaa gacatttatt |
| 1261 | gtgactattt ggactttgga atcaacctca cccctgaatc acctgaatcc aatttcacag |
| 1321 | ccaaggttac tgctgtcaat agtcttggaa gctcctcttc acttccatcc acattcacat |
| 1381 | tcttggacat agtgaggcct cttcctccgt gggacattag aatcaaattt caaaaggctt |
| 1441 | ctgtgagcag atgtaccctt tattggagag atgagggact ggtactgctt aatcgactca |
| 1501 | gatatcggcc cagtaacagc aggctctgga atatggttaa tgttacaaag gccaaaggaa |
| 1561 | gacatgattt gctggatctg aaaccattta cagaatatga atttcagatt tcctctaagc |
| 1621 | tacatcttta taagggaagt tggagtgatt ggagtgaatc attgagagca caaacaccag |
| 1681 | aagaagagcc tactgggatg ttagatgtct ggtacatgaa acggcacatt gactacagta |
| 1741 | gacaacagat ttctcttttc tggaagaatc tgagtgtctc agaggcaaga ggaaaaattc |
| 1801 | tccactatca ggtgaccttg caggagctga caggagggaa agccatgaca cagaacatca |
| 1861 | caggacacac ctcctggacc acagtcattc ctagaaccgg aaattgggct gtggctgtgt |
| 1921 | ctgcagcaaa ttcaaaaggc agttctctgc ccactcgtat taacataatg aacctgtgtg |
| 1981 | aggcagggtt gctggctcct cgccaggtct ctgcaaactc agagggcatg gacaacattc |
| 2041 | tggtgacttg gcagcctccc aggaaagatc cctctgctgt tcaggagtac gtggtggaat |
| 2101 | ggagagagct ccatccaggg ggtgacacac aggtccctct aaactggcta cggagtcgac |
| 2161 | cctacaatgt gtctgctctg atttcagaga acataaaatc ctacatctgt tatgaaatcc |
| 2221 | gtgtgtatgc actctcaggg gatcaaggag gatgcagctc catcctgggt aactctaagc |
| 2281 | acaaagcacc actgagtggc ccccacatta atgccatcac agaggaaaag gggagcattt |
| 2341 | taatttcatg gaacagcatt ccagtccagg agcaaatggg ctgcctcctc cattatagga |
| 2401 | tatactggaa ggaacgggac tccaactccc agcctcagct ctgtgaaatt ccctacagag |
| 2461 | tctcccaaaa ttcacatcca ataaacagcc tgcagccccg agtgacatat gtcctgtgga |
| 2521 | tgacagctct gacagctgct ggtgaaagtt cccacggaaa tgagagggaa ttttgtctgc |
| 2581 | aaggtaaagc caattggatg gcgtttgtgg caccaagcat ttgcattgct atcatcatgg |
| 2641 | tgggcatttt ctcaacgcat tacttccagc aaaagagaag acacagctgc ccttggacag |
| 2701 | gctcctgata gactggccca cgcctgaaga tcctgaaccg ctggtcatca gtgaagtcct |
| 2761 | tcatcaagtg accccagttt tcagacatcc cccctgctcc aactggccac aaagggaaaa |
| 2821 | aggaatccaa ggtcatcagg cctctgagaa agacatgatg cacagtgcct caagcccacc |
| 2881 | acctccaaga gctctccaag ctgagagcag acaactggtg gatctgtaca aggtgctgga |
| 2941 | gagcaggggc tccgacccaa agcccgaaaa cccagcctgt ccctggacgg tgctcccagc |
| 3001 | aggtgacctt cccacccatg atggctactt accctccaac atagatgacc tcccctcaca |
| 3061 | tgaggcacct ctcgctgact ctctggaaga actggagcct cagcacatct ccctttctgt |
| 3121 | tttcccctca agttctcttc acccactcac cttctcctgt ggtgataagc tgactctgga |
| 3181 | tcagttaaag atgaggtgtg actccctcat gctctgagtg gtgaggcttc aagccttaaa |
| 3241 | gtcagtgtgc cctcaaccag cacagcctgc cccaattccc ccagcccctg ctccagcagc |
| 3301 | tgtcatctct gggtgccacc atcggtctgg ctgcagctag aggacaggca agccagctct |
| 3361 | gggggagtct taggaactgg gagttggtct tcactcagat gcctcatctt gcctttccca |
| 3421 | gggccttaaa attacatcct tcactgtgtg gacctagaga ctccaacttg aattcctagt |
| 3481 | aactttcttg gtatgctggc cagaaaggga aatgaggagg agagtagaaa ccacagctct |
| 3541 | tagtagtaat ggcatacagt ctagaggacc attcatgcaa tgactatttc taaagcacct |
| 3601 | gctacacagc aggctgtaca cagcagatca gtactgttca acagaacttc ctgagatgat |
| 3661 | ggaaatgttc tacctctgca ctcactgtcc agtacattag acactaggca cattggctgt |
| 3721 | taatcacttg gaatgtgttt agcttgactg aggaattaaa ttttgattgt aaatttaaat |
| 3781 | cgccacacat ggctagtggc tactgtattg gagtgcacag ctctagatgg ctcctagatt |
| 3841 | attgagagcc ttcaaaacaa atcaacctag ttctatagat gaagacataa aagacactgg |
| 3901 | taaacaccaa ggtaaaaggg cccccaaggt ggtcatgact ggtctcattt gcagaagtct |
| 3961 | aagaatgtac ctttttctgg ccgggcgtgg tagctcatgc ctgtaatccc agcactttgg |
| 4021 | gaggctga |
| Human IL-12R β2 mRNA Variant 3 | |
| (SEQ ID NO: 10) | |
| 1 | tgcagagcac agagaaagga catctgcgag gaaagttccc tgatggctgt caacaaagtg |
| 61 | ccacgtctct atggctgtga acgctgagca cacgatttta tcgcgcctat catatcttgg |
| 121 | tgcataaacg cacctcacct cggtcaaccc ttgctccgtc ttatgagaca ggctttatta |
| 181 | tccgcatttt atatgagggg aaactgacgg tggagagaga attatcttgc tcaaggcgac |
| 241 | acagcagagc ccacaggtgg cagaatccca cccgagcccg cttcgacccg cggggtggaa |
| 301 | accacgggcg cccgcccggc tgcgcttcca gagctgaact gagaagcgag tcctctccgc |
| 361 | cctgcggcca ccgcccagcc ccgacccccg ccccggcccg atcctcactc gccgccagct |
| 421 | ccccgcgccc accccggagt tggtggcgca gaggcgggag gcggaggcgg gagggcgggc |
| 481 | gctggcaccg ggaacgcccg agcgccggca gagagcgcgg agagcgcgac acgtgcggcc |
| 541 | cagagcaccg gggccacccg gtccccgcag gcccgggacc gcgcccgctg gcaggcgaca |
| 601 | cgtggaagaa tacggagttc tataccagag ttgattgttg atggcacata cttttagagg |
| 661 | atgctcattg gcatttatgt ttataatcac gtggctgttg attaaagcaa aaatagatgc |
| 721 | gtgcaagaga ggcgatgtga ctgtgaagcc ttcccatgta attttacttg gatccactgt |
| 781 | caatattaca tgctctttga agcccagaca aggctgcttt cactattcca gacgtaacaa |
| 841 | gttaatcctg tacaagtttg acagaagaat caattttcac catggccact ccctcaattc |
| 901 | tcaagtcaca ggtcttcccc ttggtacaac cttgtttgtc tgcaaactgg cctgtatcaa |
| 961 | tagtgatgaa attcaaatat gtggagcaga gatcttcgtt ggtgttgctc cagaacagcc |
| 1021 | tcaaaattta tcctgcatac agaagggaga acaggggact gtggcctgca cctgggaaag |
| 1081 | aggacgagac acccacttat acactgagta tactctacag ctaagtggac caaaaaattt |
| 1141 | aacctggcag aagcaatgta aagacattta ttgtgactat ttggactttg gaatcaacct |
| 1201 | cacccctgaa tcacctgaat ccaatttcac agccaaggtt actgctgtca atagtcttgg |
| 1261 | aagctcctct tcacttccat ccacattcac attcttggac atagtgaggc ctcttcctcc |
| 1321 | gtgggacatt agaatcaaat ttcaaaaggc ttctgtgagc agatgtaccc tttattggag |
| 1381 | agatgaggga ctggtactgc ttaatcgact cagatatcgg cccagtaaca gcaggctctg |
| 1441 | gaatatggtt aatgttacaa aggccaaagg aagacatgat ttgctggatc tgaaaccatt |
| 1501 | tacagaatat gaatttcaga tttcctctaa gctacatctt tataagggaa gttggagtga |
| 1561 | ttggagtgaa tcattgagag cacaaacacc agaagaagag cctactggga tgttagatgt |
| 1621 | ctggtacatg aaacggcaca ttgactacag tagacaacag atttctcttt tctggaagaa |
| 1681 | tctgagtgtc tcagaggcaa gaggaaaaat tctccactat caggtgacct tgcaggagct |
| 1741 | gacaggaggg aaagccatga cacagaacat cacaggacac acctcctgga ccacagtcat |
| 1801 | tcctagaacc ggaaattggg ctgtggctgt gtctgcagca aattcaaaag gcagttctct |
| 1861 | gcccactcgt attaacataa tgaacctgtg tgaggcaggg ttgctggctc ctcgccaggt |
| 1921 | ctctgcaaac tcagagggca tggacaacat tctggtgact tggcagcctc ccaggaaaga |
| 1981 | tccctctgct gttcaggagt acgtggtgga atggagagag ctccatccag ggggtgacac |
| 2041 | acaggtccct ctaaactggc tacggagtcg accctacaat gtgtctgctc tgatttcaga |
| 2101 | aattccctac agagtctccc aaaattcaca tccaataaac agcctgcagc cccgagtgac |
| 2161 | atatgtcctg tggatgacag ctctgacagc tgctggtgaa agttcccacg gaaatgagag |
| 2221 | ggaattttgt ctgcaaggta aagccaattg gatggcgttt gtggcaccaa gcatttgcat |
| 2281 | tgctatcatc atggtgggca ttttctcaac gcattacttc cagcaaaagg tgtttgttct |
| 2341 | cctagcagcc ctcagacctc agtggtgtag cagagaaatt ccagatccag caaatagcac |
| 2401 | ttgcgctaag aaatatccca ttgcagagga gaagacacag ctgcccttgg acaggctcct |
| 2461 | gatagactgg cccacgcctg aagatcctga accgctggtc atcagtgaag tccttcatca |
| 2521 | agtgacccca gttttcagac atcccccctg ctccaactgg ccacaaaggg aaaaaggaat |
| 2581 | ccaaggtcat caggcctctg agaaagacat gatgcacagt gcctcaagcc caccacctcc |
| 2641 | aagagctctc caagctgaga gcagacaact ggtggatctg tacaaggtgc tggagagcag |
| 2701 | gggctccgac ccaaagcccg aaaacccagc ctgtccctgg acggtgctcc cagcaggtga |
| 2761 | ccttcccacc catgatggct acttaccctc caacatagat gacctcccct cacatgaggc |
| 2821 | acctctcgct gactctctgg aagaactgga gcctcagcac atctcccttt ctgttttccc |
| 2881 | ctcaagttct cttcacccac tcaccttctc ctgtggtgat aagctgactc tggatcagtt |
| 2941 | aaagatgagg tgtgactccc tcatgctctg agtggtgagg cttcaagcct taaagtcagt |
| 3001 | gtgccctcaa ccagcacagc ctgccccaat tcccccagcc cctgctccag cagctgtcat |
| 3061 | ctctgggtgc caccatcggt ctggctgcag ctagaggaca ggcaagccag ctctggggga |
| 3121 | gtcttaggaa ctgggagttg gtcttcactc agatgcctca tcttgccttt cccagggcct |
| 3181 | taaaattaca tccttcactg tgtggaccta gagactccaa cttgaattcc tagtaacttt |
| 3241 | cttggtatgc tggccagaaa gggaaatgag gaggagagta gaaaccacag ctcttagtag |
| 3301 | taatggcata cagtctagag gaccattcat gcaatgacta tttctaaagc acctgctaca |
| 3361 | cagcaggctg tacacagcag atcagtactg ttcaacagaa cttcctgaga tgatggaaat |
| 3421 | gttctacctc tgcactcact gtccagtaca ttagacacta ggcacattgg ctgttaatca |
| 3481 | cttggaatgt gtttagcttg actgaggaat taaattttga ttgtaaattt aaatcgccac |
| 3541 | acatggctag tggctactgt attggagtgc acagctctag atggctccta gattattgag |
| 3601 | agccttcaaa acaaatcaac ctagttctat agatgaagac ataaaagaca ctggtaaaca |
| 3661 | ccaaggtaaa agggccccca aggtggtcat gactggtctc atttgcagaa gtctaagaat |
| 3721 | gtaccttttt ctggccgggc gtggtagctc atgcctgtaa tcccagcact ttgggaggct |
| 3781 | ga |
| Human IL-12R β2 mRNA Variant 4 | |
| (SEQ ID NO: 11) | |
| 1 | tgcagagcac agagaaagga catctgcgag gaaagttccc tgatggctgt caacaaagtg |
| 61 | ccacgtctct atggctgtga acgctgagca cacgatttta tcgcgcctat catatcttgg |
| 121 | tgcataaacg cacctcacct cggtcaaccc ttgctccgtc ttatgagaca ggctttatta |
| 181 | tccgcatttt atatgagggg aaactgacgg tggagagaga attatcttgc tcaaggcgac |
| 241 | acagcagagc ccacaggtgg cagaatccca cccgagcccg cttcgacccg cggggtggaa |
| 301 | accacgggcg cccgcccggc tgcgcttcca gagctgaact gagaagcgag tcctctccgc |
| 361 | cctgcggcca ccgcccagcc ccgacccccg ccccggcccg atcctcactc gccgccagct |
| 421 | ccccgcgccc accccggagt tggtggcgca gaggcgggag gcggaggcgg gagggcgggc |
| 481 | gctggcaccg ggaacgcccg agcgccggca gagagcgcgg agagcgcgac acgtgcggcc |
| 541 | cagagcaccg gggccacccg gtccccgcag gcccgggacc gcgcccgctg gcaggcgaca |
| 601 | cgtggaagaa tacggagttc tataccagag ttgattgttg atggcacata cttttagagg |
| 661 | atgctcattg gcatttatgt ttataatcac gtggctgttg attaaagcaa aaatagatgc |
| 721 | gtgcaagaga ggcgatgtga ctgtgaagcc ttcccatgta attttacttg gatccactgt |
| 781 | caatattaca tgctctttga agcccagaca aggctgcttt cactattcca gacgtaacaa |
| 841 | gttaatcctg tacaagtttg acagaagaat caattttcac catggccact ccctcaattc |
| 901 | tcaagtcaca ggtcttcccc ttggtacaac cttgtttgtc tgcaaactgg cctgtatcaa |
| 961 | tagtgatgaa attcaaatat gtggagcaga gatcttcgtt ggtgttgctc cagaacagcc |
| 1021 | tcaaaattta tcctgcatac agaagggaga acaggggact gtggcctgca cctgggaaag |
| 1081 | aggacgagac acccacttat acactgagta tactctacag ctaagtggac caaaaaattt |
| 1141 | aacctggcag aagcaatgta aagacattta ttgtgactat ttggactttg gaatcaacct |
| 1201 | cacccctgaa tcacctgaat ccaatttcac agccaaggtt actgctgtca atagtcttgg |
| 1261 | aagctcctct tcacttccat ccacattcac attcttggac atagtgaggc ctcttcctcc |
| 1321 | gtgggacatt agaatcaaat ttcaaaaggc ttctgtgagc agatgtaccc tttattggag |
| 1381 | agatgaggga ctggtactgc ttaatcgact cagatatcgg cccagtaaca gcaggctctg |
| 1441 | gaatatggtt aatgttacaa aggccaaagg aagacatgat ttgctggatc tgaaaccatt |
| 1501 | tacagaatat gaatttcaga tttcctctaa gctacatctt tataagggaa gttggagtga |
| 1561 | ttggagtgaa tcattgagag cacaaacacc agaagaagag cctactggga tgttagatgt |
| 1621 | ctggtacatg aaacggcaca ttgactacag tagacaacag atttctcttt tctggaagaa |
| 1681 | tctgagtgtc tcagaggcaa gaggaaaaat tctccactat caggtgacct tgcaggagct |
| 1741 | gacaggaggg aaagccatga cacagaacat cacaggacac acctcctgga ccacagtcat |
| 1801 | tcctagaacc ggaaattggg ctgtggctgt gtctgcagca aattcaaaag gcagttctct |
| 1861 | gcccactcgt attaacataa tgaacctgtg tgaggcaggg ttgctggctc ctcgccaggt |
| 1921 | ctctgcaaac tcagagggca tggacaacat tctggtgact tggcagcctc ccaggaaaga |
| 1981 | tccctctgct gttcaggagt acgtggtgga atggagagag ctccatccag ggggtgacac |
| 2041 | acaggtccct ctaaactggc tacggagtcg accctacaat gtgtctgctc tgatttcaga |
| 2101 | gaacataaaa tcctacatct gttatgaaat ccgtgtgtat gcactctcag gggatcaagg |
| 2161 | aggatgcagc tccatcctgg gtaactctaa gcacaaagca ccactgagtg gcccccacat |
| 2221 | taatgccatc acagaggaaa aggggagcat tttaatttca tggaacagca ttccagtcca |
| 2281 | ggagcaaatg ggctgcctcc tccattatag gatatactgg aaggaacggg actccaactc |
| 2341 | ccagcctcag ctctgtgaaa ttccctacag agtctcccaa aattcacatc caataaacag |
| 2401 | cctgcagccc cgagtgacat atgtcctgtg gatgacagct ctgacagctg ctggtgaaag |
| 2461 | ttcccacgga aatgagaggg aattttgtct gcaaggagaa gacacagctg cccttggaca |
| 2521 | ggctcctgat agactggccc acgcctgaag atcctgaacc gctggtcatc agtgaagtcc |
| 2581 | ttcatcaagt gaccccagtt ttcagacatc ccccctgctc caactggcca caaagggaaa |
| 2641 | aaggaatcca aggtcatcag gcctctgaga aagacatgat gcacagtgcc tcaagcccac |
| 2701 | cacctccaag agctctccaa gctgagagca gacaactggt ggatctgtac aaggtgctgg |
| 2761 | agagcagggg ctccgaccca aagcccgaaa acccagcctg tccctggacg gtgctcccag |
| 2821 | caggtgacct tcccacccat gatggctact taccctccaa catagatgac ctcccctcac |
| 2881 | atgaggcacc tctcgctgac tctctggaag aactggagcc tcagcacatc tccctttctg |
| 2941 | ttttcccctc aagttctctt cacccactca ccttctcctg tggtgataag ctgactctgg |
| 3001 | atcagttaaa gatgaggtgt gactccctca tgctctgagt ggtgaggctt caagccttaa |
| 3061 | agtcagtgtg ccctcaacca gcacagcctg ccccaattcc cccagcccct gctccagcag |
| 3121 | ctgtcatctc tgggtgccac catcggtctg gctgcagcta gaggacaggc aagccagctc |
| 3181 | tgggggagtc ttaggaactg ggagttggtc ttcactcaga tgcctcatct tgcctttccc |
| 3241 | agggccttaa aattacatcc ttcactgtgt ggacctagag actccaactt gaattcctag |
| 3301 | taactttctt ggtatgctgg ccagaaaggg aaatgaggag gagagtagaa accacagctc |
| 3361 | ttagtagtaa tggcatacag tctagaggac cattcatgca atgactattt ctaaagcacc |
| 3421 | tgctacacag caggctgtac acagcagatc agtactgttc aacagaactt cctgagatga |
| 3481 | tggaaatgtt ctacctctgc actcactgtc cagtacatta gacactaggc acattggctg |
| 3541 | ttaatcactt ggaatgtgtt tagcttgact gaggaattaa attttgattg taaatttaaa |
| 3601 | tcgccacaca tggctagtgg ctactgtatt ggagtgcaca gctctagatg gctcctagat |
| 3661 | tattgagagc cttcaaaaca aatcaaccta gttctataga tgaagacata aaagacactg |
| 3721 | gtaaacacca aggtaaaagg gcccccaagg tggtcatgac tggtctcatt tgcagaagtc |
| 3781 | taagaatgta cctttttctg gccgggcgtg gtagctcatg cctgtaatcc cagcactttg |
| 3841 | ggaggctga |
| Human IL-23R mRNA | |
| (SEQ ID NO: 12) | |
| 1 | acaagggtgg cagcctggct ctgaagtgga attatgtgct tcaaacaggt tgaaagaggg |
| 61 | aaacagtctt ttcctgcttc cagacatgaa tcaggtcact attcaatggg atgcagtaat |
| 121 | agccctttac atactcttca gctggtgtca tggaggaatt acaaatataa actgctctgg |
| 181 | ccacatctgg gtagaaccag ccacaatttt taagatgggt atgaatatct ctatatattg |
| 241 | ccaagcagca attaagaact gccaaccaag gaaacttcat ttttataaaa atggcatcaa |
| 301 | agaaagattt caaatcacaa ggattaataa aacaacagct cggctttggt ataaaaactt |
| 361 | tctggaacca catgcttcta tgtactgcac tgctgaatgt cccaaacatt ttcaagagac |
| 421 | actgatatgt ggaaaagaca tttcttctgg atatccgcca gatattcctg atgaagtaac |
| 481 | ctgtgtcatt tatgaatatt caggcaacat gacttgcacc tggaatgctg ggaagctcac |
| 541 | ctacatagac acaaaatacg tggtacatgt gaagagttta gagacagaag aagagcaaca |
| 601 | gtatctcacc tcaagctata ttaacatctc cactgattca ttacaaggtg gcaagaagta |
| 661 | cttggtttgg gtccaagcag caaacgcact aggcatggaa gagtcaaaac aactgcaaat |
| 721 | tcacctggat gatatagtga taccttctgc agccgtcatt tccagggctg agactataaa |
| 781 | tgctacagtg cccaagacca taatttattg ggatagtcaa acaacaattg aaaaggtttc |
| 841 | ctgtgaaatg agatacaagg ctacaacaaa ccaaacttgg aatgttaaag aatttgacac |
| 901 | caattttaca tatgtgcaac agtcagaatt ctacttggag ccaaacatta agtacgtatt |
| 961 | tcaagtgaga tgtcaagaaa caggcaaaag gtactggcag ccttggagtt caccgttttt |
| 1021 | tcataaaaca cctgaaacag ttccccaggt cacatcaaaa gcattccaac atgacacatg |
| 1081 | gaattctggg ctaacagttg cttccatctc tacagggcac cttacttctg acaacagagg |
| 1141 | agacattgga cttttattgg gaatgatcgt ctttgctgtt atgttgtcaa ttctttcttt |
| 1201 | gattgggata tttaacagat cattccgaac tgggattaaa agaaggatct tattgttaat |
| 1261 | accaaagtgg ctttatgaag atattcctaa tatgaaaaac agcaatgttg tgaaaatgct |
| 1321 | acaggaaaat agtgaactta tgaataataa ttccagtgag caggtcctat atgttgatcc |
| 1381 | catgattaca gagataaaag aaatcttcat cccagaacac aagcctacag actacaagaa |
| 1441 | ggagaataca ggacccctgg agacaagaga ctacccgcaa aactcgctat tcgacaatac |
| 1501 | tacagttgta tatattcctg atctcaacac tggatataaa ccccaaattt caaattttct |
| 1561 | gcctgaggga agccatctca gcaataataa tgaaattact tccttaacac ttaaaccacc |
| 1621 | agttgattcc ttagactcag gaaataatcc caggttacaa aagcatccta attttgcttt |
| 1681 | ttctgtttca agtgtgaatt cactaagcaa cacaatattt cttggagaat taagcctcat |
| 1741 | attaaatcaa ggagaatgca gttctcctga catacaaaac tcagtagagg aggaaaccac |
| 1801 | catgcttttg gaaaatgatt cacccagtga aactattcca gaacagaccc tgcttcctga |
| 1861 | tgaatttgtc tcctgtttgg ggatcgtgaa tgaggagttg ccatctatta atacttattt |
| 1921 | tccacaaaat attttggaaa gccacttcaa taggatttca ctcttggaaa agtagagctg |
| 1981 | tgtggtcaaa atcaatatga gaaagctgcc ttgcaatctg aacttgggtt ttccctgcaa |
| 2041 | tagaaattga attctgcctc tttttgaaaa aaatgtattc acatacaaat cttcacatgg |
| 2101 | acacatgttt tcatttccct tggataaata cctaggtagg ggattgctgg gccatatgat |
| 2161 | aagcatatgt ttcagttcta ccaatcttgt ttccagagta gtgacatttc tgtgctccta |
| 2221 | ccatcaccat gtaagaattc ccgggagctc catgcctttt taattttagc cattcttctg |
| 2281 | cctcatttct taaaattaga gaattaaggt cccgaaggtg gaacatgctt catggtcaca |
| 2341 | catacaggca caaaaacagc attatgtgga cgcctcatgt attttttata gagtcaacta |
| 2401 | tttcctcttt attttccctc attgaaagat gcaaaacagc tctctattgt gtacagaaag |
| 2461 | ggtaaataat gcaaaatacc tggtagtaaa ataaatgctg aaaattttcc tttaaaatag |
| 2521 | aatcattagg ccaggcgtgg tggctcatgc ttgtaatccc agcactttgg taggctgagg |
| 2581 | tgggtggatc acctgaggtc aggagttcga gtccagcctg gccaatatgc tgaaaccctg |
| 2641 | tctctactaa aattacaaaa attagccggc catggtggca ggtgcttgta atcccagcta |
| 2701 | cttgggaggc tgaggcagga gaatcacttg aaccaggaag gcagaggttg cactgagctg |
| 2761 | agattgtgcc actgcactcc agcctgggca acaagagcaa aactctgtct ggaaaaaaaa |
| 2821 | aaaaaa |

[0277] An antisense nucleic acid molecule can be complementary to all or part of a non-coding region of the coding strand of a nucleotide sequence encoding an IL-12A (p35), IL-12B (p40), IL-23 (p19), IL-12R β1, IL-12R β2, or IL-23R protein. Non-coding regions (5′ and 3′ untranslated regions) are the 5′ and 3′ sequences that flank the coding region in a gene and are not translated into amino acids.

[0278] Based upon the sequences disclosed herein, one of skill in the art can easily choose and synthesize any of a number of appropriate antisense nucleic acids to target a nucleic acid encoding an IL-12A (p35), IL-12B (p40), IL-23 (p19), IL-12R β1, IL-12R β2, or IL-23R protein described herein. Antisense nucleic acids targeting a nucleic acid encoding an IL-12A (p35), IL-12B (p40), IL-23 (p19), IL-12R β1, IL-12R β2, or IL-23R protein can be designed using the software available at the Integrated DNA Technologies website.

[0279] An antisense nucleic acid can be, for example, about 5, 10, 15, 20, 25, 30, 35, 40, 45, or 50 nucleotides or more in length. An antisense oligonucleotide can be constructed using chemical synthesis and enzymatic ligation reactions using procedures known in the art. For example, an antisense nucleic acid can be chemically synthesized using naturally occurring nucleotides or variously modified nucleotides designed to increase the biological stability of the molecules or to increase the physical stability of the duplex formed between the antisense and sense nucleic acids, e.g., phosphorothioate derivatives and acridine substituted nucleotides can be used.

[0280] Examples of modified nucleotides which can be used to generate an antisense nucleic acid include 5-fluorouracil, 5-bromouracil, 5-chlorouracil, 5-iodouracil, hypoxanthine, xanthine, 4-acetylcytosine, 5-(carboxyhydroxylmethyl) uracil, 5-carboxymethylaminomethyl-2-thiouridine, 5-carboxymethylaminomethyluracil, dihydrouracil, beta-D-galactosylqueosine, inosine, N6-isopentenyladenine, 1-methylguanine, 1-methylinosine, 2,2-dimethylguanine, 2-methyladenine, 2-methylguanine, 3-methylcytosine, 5-methylcytosine, N6-adenine, 7-methylguanine, 5-methylaminomethyluracil, 5-methoxyaminomethyl-2-thiouracil, beta-D-mannosylqueosine, 5′-methoxycarboxymethyluracil, 5-methoxyuracil, 2-methylthio-N6-isopentenyladenine, uracil-5-oxyacetic acid (v), wybutoxosine, pseudouracil, queosine, 2-thiocytosine, 5-methyl-2-thiouracil, 2-thiouracil, 4-thiouracil, 5-methyluracil, uracil-5-oxyacetic acid methylester, uracil-5-oxyacetic acid (v), 5-methyl-2-thiouracil, 3-(3-amino-3-N-2-carboxypropyl) uracil, (acp3)w, and 2,6-diaminopurine. Alternatively, the antisense nucleic acid can be produced biologically using an expression vector into which a nucleic acid has been subcloned in an antisense orientation (i.e., RNA transcribed from the inserted nucleic acid will be of an anti sense orientation to a target nucleic acid of interest).

[0281] The antisense nucleic acid molecules described herein can be prepared in vitro and administered to a mammal, e.g., a human. Alternatively, they can be generated in situ such that they hybridize with or bind to cellular mRNA and/or genomic DNA encoding an IL-12A (p35), IL-12B (p40), IL-23 (p19), IL-12R β1, IL-12R β2, or IL-23R protein to thereby inhibit expression, e.g., by inhibiting transcription and/or translation. The hybridization can be by conventional nucleotide complementarities to form a stable duplex, or, for example, in the case of an antisense nucleic acid molecule that binds to DNA duplexes, through specific interactions in the major groove of the double helix. The antisense nucleic acid molecules can be delivered to a mammalian cell using a vector (e.g., a lentivirus, a retrovirus, or an adenovirus vector).

[0282] An antisense nucleic acid can be an α-anomeric nucleic acid molecule. An α-anomeric nucleic acid molecule forms specific double-stranded hybrids with complementary RNA in which, contrary to the usual, β-units, the strands run parallel to each other (Gaultier et al., Nucleic Acids Res. 15:6625-6641, 1987). The antisense nucleic acid can also comprise a 2′-O-methylribonucleotide (Inoue et al., Nucleic Acids Res. 15:6131-6148, 1987) or a chimeric RNA-DNA analog (Inoue et al., FEBS Lett. 215:327-330, 1987). Non-limiting examples of antisense nucleic acids are described in Vaknin-Dembinsky et al., J. Immunol. 176(12): 7768-7774, 2006.

[0283] Another example of an inhibitory nucleic acid is a ribozyme that has specificity for a nucleic acid encoding an IL-12A (p35), IL-12B (p40), IL-23 (p19), IL-12R β1, IL-12R β2, or IL-23R protein (e.g., specificity for an IL-12A (p35), IL-12B (p40), IL-23 (p19), IL-12R β1, IL-12R β2, or IL-23R mRNA, e.g., specificity for any one of SEQ ID NOs: 1-12). Ribozymes are catalytic RNA molecules with ribonuclease activity that are capable of cleaving a single-stranded nucleic acid, such as an mRNA, to which they have a complementary region. Thus, ribozymes (e.g., hammerhead ribozymes (described in Haselhoff and Gerlach, Nature 334:585-591, 1988)) can be used to catalytically cleave mRNA transcripts to thereby inhibit translation of the protein encoded by the mRNA. A ribozyme having specificity for an IL-12A (p35), IL-12B (p40), IL-23 (p19), IL-12R β1, IL-12R β2, or IL-23R mRNA can be designed based upon the nucleotide sequence of any of the IL-12A (p35), IL-12B (p40), IL-23 (p19), IL-12R β1, IL-12R β2, and IL-23R mRNA sequences disclosed herein. For example, a derivative of a Tetrahymena L-19 IVS RNA can be constructed in which the nucleotide sequence of the active site is complementary to the nucleotide sequence to be cleaved in an IL-12A (p35), IL-12B (p40), IL-23 (p19), IL-12R β1, IL-12R β2, or IL-23R mRNA (see, e.g., U.S. Pat. Nos. 4,987,071 and 5,116,742). Alternatively, an IL-12A (p35), IL-12B (p40), IL-23 (p19), IL-12R β1, IL-12R β2, or IL-23R mRNA can be used to select a catalytic RNA having a specific ribonuclease activity from a pool of RNA molecules. See, e.g., Bartel et al., Science 261:1411-1418, 1993.

[0284] An inhibitor nucleic acid can also be a nucleic acid molecule that forms triple helical structures. For example, expression of an IL-12A (p35), IL-12B (p40), IL-23 (p19), IL-12R β1, IL-12R β2, or IL-23R protein can be inhibited by targeting nucleotide sequences complementary to the regulatory region of the gene encoding the IL-12A (p35), IL-12B (p40), IL-23 (p19), IL-12R β1, IL-12R β2, or IL-23R protein (e.g., the promoter and/or enhancer, e.g., a sequence that is at least 1 kb, 2 kb, 3 kb, 4 kb, or 5 kb upstream of the transcription initiation start state) to form triple helical structures that prevent transcription of the gene in target cells. See generally Helene, Anticancer Drug Des. 6(6):569-84, 1991; Helene, Ann. N.Y. Acad. Sci. 660:27-36, 1992; and Maher, Bioassays 14(12):807-15, 1992.

[0285] In various embodiments, inhibitory nucleic acids can be modified at the base moiety, sugar moiety, or phosphate backbone to improve, e.g., the stability, hybridization, or solubility of the molecule. For example, the deoxyribose phosphate backbone of the nucleic acids can be modified to generate peptide nucleic acids (see, e.g., Hyrup et al., Bioorganic Medicinal Chem. 4(1):5-23, 1996). Peptide nucleic acids (PNAs) are nucleic acid mimics, e.g., DNA mimics, in which the deoxyribose phosphate backbone is replaced by a pseudopeptide backbone and only the four natural nucleobases are retained. The neutral backbone of PNAs allows for specific hybridization to DNA and RNA under conditions of low ionic strength. The synthesis of PNA oligomers can be performed using standard solid phase peptide synthesis protocols (see, e.g., Perry-O'Keefe et al., Proc. Natl. Acad. Sci. U.S.A. 93:14670-675, 1996). PNAs can be used as antisense or antigene agents for sequence-specific modulation of gene expression by, e.g., inducing transcription or translation arrest or inhibiting replication.

[0286] PNAs can be modified, e.g., to enhance their stability or cellular uptake, by attaching lipophilic or other helper groups to PNA, by the formation of PNA-DNA chimeras, or by the use of liposomes or other techniques of drug delivery known in the art. For example, PNA-DNA chimeras can be generated which may combine the advantageous properties of PNA and DNA. Such chimeras allow DNA recognition enzymes, e.g., RNAse H and DNA polymerases, to interact with the DNA portion while the PNA portion would provide high binding affinity and specificity. PNA-DNA chimeras can be linked using linkers of appropriate lengths selected in terms of base stacking, number of bonds between the nucleobases, and orientation.

[0287] The synthesis of PNA-DNA chimeras can be performed as described in Finn et al., Nucleic Acids Res. 24:3357-63, 1996. For example, a DNA chain can be synthesized on a solid support using standard phosphoramidite coupling chemistry and modified nucleoside analogs. Compounds such as 5′-(4-methoxytrityl)amino-5′-deoxy-thymidine phosphoramidite can be used as a link between the PNA and the 5′ end of DNA (Mag et al., Nucleic Acids Res. 17:5973-88, 1989). PNA monomers are then coupled in a stepwise manner to produce a chimeric molecule with a 5′ PNA segment and a 3′ DNA segment (Finn et al., Nucleic Acids Res. 24:3357-63, 1996). Alternatively, chimeric molecules can be synthesized with a 5′ DNA segment and a 3′ PNA segment (Peterser et al., Bioorganic Med. Chem. Lett. 5:1119-11124, 1975).

[0288] In some embodiments, the inhibitory nucleic acids can include other appended groups such as peptides, or agents facilitating transport across the cell membrane (see, Letsinger et al., Proc. Natl. Acad. Sci. U.S.A. 86:6553-6556, 1989; Lemaitre et al., Proc. Natl. Acad. Sci. U.S.A. 84:648-652, 1989; and WO 88/09810). In addition, the inhibitory nucleic acids can be modified with hybridization-triggered cleavage agents (see, e.g., Krol et al., Bio/Techniques 6:958-976, 1988) or intercalating agents (see, e.g., Zon, Pharm. Res. 5:539-549, 1988). To this end, the oligonucleotide may be conjugated to another molecule, e.g., a peptide, hybridization triggered cross-linking agent, transport agent, hybridization-triggered cleavage agent, etc.

[0289] Another means by which expression of an IL-12A (p35), IL-12B (p40), IL-23 (p19), IL-12R β1, IL-12R β2, or IL-23R mRNA can be decreased in a mammalian cell is by RNA interference (RNAi). RNAi is a process in which mRNA is degraded in host cells. To inhibit an mRNA, double-stranded RNA (dsRNA) corresponding to a portion of the gene to be silenced (e.g., a gene encoding an IL-12A (p35), IL-12B (p40), IL-23 (p19), IL-12R β1, IL-12R β2, or IL-23R protein) is introduced into a mammalian cell. The dsRNA is digested into 21-23 nucleotide-long duplexes called short interfering RNAs (or siRNAs), which bind to a nuclease complex to form what is known as the RNA-induced silencing complex (or RISC). The RISC targets the homologous transcript by base pairing interactions between one of the siRNA strands and the endogenous mRNA. It then cleaves the mRNA about 12 nucleotides from the 3′ terminus of the siRNA (see Sharp et al., Genes Dev. 15:485-490, 2001, and Hammond et al., Nature Rev. Gen. 2:110-119, 2001).

[0290] RNA-mediated gene silencing can be induced in a mammalian cell in many ways, e.g., by enforcing endogenous expression of RNA hairpins (see, Paddison et al., Proc. Natl. Acad. Sci. U.S.A. 99:1443-1448, 2002) or, as noted above, by transfection of small (21-23 nt) dsRNA (reviewed in Caplen, Trends Biotech. 20:49-51, 2002). Methods for modulating gene expression with RNAi are described, e.g., in U.S. Pat. No. 6,506,559 and US 2003/0056235, which are hereby incorporated by reference.

[0291] Standard molecular biology techniques can be used to generate siRNAs. Short interfering RNAs can be chemically synthesized, recombinantly produced, e.g., by expressing RNA from a template DNA, such as a plasmid, or obtained from commercial vendors, such as Dharmacon. The RNA used to mediate RNAi can include synthetic or modified nucleotides, such as phosphorothioate nucleotides. Methods of transfecting cells with siRNA or with plasmids engineered to make siRNA are routine in the art.

[0292] The siRNA molecules used to decrease expression of an IL-12A (p35), IL-12B (p40), IL-23 (p19), IL-12R β1, IL-12R β2, or IL-23R mRNA can vary in a number of ways. For example, they can include a 3′ hydroxyl group and strands of 21, 22, or 23 consecutive nucleotides. They can be blunt ended or include an overhanging end at either the 3′ end, the 5′ end, or both ends. For example, at least one strand of the RNA molecule can have a 3′ overhang from about 1 to about 6 nucleotides (e.g., 1-5, 1-3, 2-4 or 3-5 nucleotides (whether pyrimidine or purine nucleotides) in length. Where both strands include an overhang, the length of the overhangs may be the same or different for each strand.

[0293] To further enhance the stability of the RNA duplexes, the 3′ overhangs can be stabilized against degradation (by, e.g., including purine nucleotides, such as adenosine or guanosine nucleotides or replacing pyrimidine nucleotides by modified analogues (e.g., substitution of uridine 2-nucleotide 3′ overhangs by 2′-deoxythymidine is tolerated and does not affect the efficiency of RNAi). Any siRNA can be used in the methods of decreasing IL-12A (p35), IL-12B (p40), IL-23 (p19), IL-12R β1, IL-12R β2, or IL-23R mRNA, provided it has sufficient homology to the target of interest (e.g., a sequence present in any one of SEQ ID NOs: 1-12, e.g., a target sequence encompassing the translation start site or the first exon of the mRNA). There is no upper limit on the length of the siRNA that can be used (e.g., the siRNA can range from about 21 base pairs of the gene to the full length of the gene or more (e.g., about 20 to about 30 base pairs, about 50 to about 60 base pairs, about 60 to about 70 base pairs, about 70 to about 80 base pairs, about 80 to about 90 base pairs, or about 90 to about 100 base pairs).

[0294] Non-limiting examples of siRNAs targeting IL-12A (p35), IL-12B (p40), IL-23 (p19), IL-12R β1, IL-12R β2, or IL-23R are described in Tan et al., J. Alzheimers Dis. 38(3): 633-646, 2014; Niimi et al., J. Neuroimmunol. 254(1-2): 39-45, 2013. Non-limiting examples of short hairpin RNA (shRNA) targeting IL-12A (p35), IL-12B (p40), IL-23 (p19), IL-12R β1, IL-12R β2, or IL-23R are described in Bak et al., BMC Dermatol. 11:5, 2011.

[0295] Non-limiting examples of inhibitory nucleic acids are microRNAs (e.g., microRNA-29 (Brain et al., Immunity 39(3):521-536, 2013), miR-10a (Xue et al., J. Immunol. 187(11):5879-5886, 2011), microRNA-155 (Podsiad et al., Am. J. Physiol. Lung Cell Mol. Physiol. 310(5):L465-75, 2016).

[0296] In some embodiments, a therapeutically effective amount of an inhibitory nucleic acid targeting IL-12A (p35), IL-12B (p40), IL-23 (p19), IL-12R β1, IL-12R β2, or IL-23R can be administered to a subject (e.g., a human subject) in need thereof.

[0297] In some embodiments, the inhibitory nucleic acid can be about 10 nucleotides to about 40 nucleotides (e.g., about 10 to about 30 nucleotides, about 10 to about 25 nucleotides, about 10 to about 20 nucleotides, about 10 to about 15 nucleotides, 10 nucleotides, 11 nucleotides, 12 nucleotides, 13 nucleotides, 14 nucleotides, 15 nucleotides, 16 nucleotides, 17 nucleotides, 18 nucleotides, 19 nucleotides, 20 nucleotides, 21 nucleotides, 22 nucleotides, 23 nucleotides, 24 nucleotides, 25 nucleotides, 26 nucleotides, 27 nucleotides, 28 nucleotides, 29 nucleotides, 30 nucleotides, 31 nucleotides, 32 nucleotides, 33 nucleotides, 34 nucleotides, 35 nucleotides, 36 nucleotides, 37 nucleotides, 38 nucleotides, 39 nucleotides, or 40 nucleotides) in length. One skilled in the art will appreciate that inhibitory nucleic acids may comprise at least one modified nucleic acid at either the 5′ or 3′ end of DNA or RNA.

[0298] Any of the inhibitor nucleic acids described herein can be formulated for administration to the gastrointestinal tract. See, e.g., the formulation methods described in US 2016/0090598 and Schoellhammer et al., Gastroenterology, doi: 10.1053/j.gastro.2017.01.002, 2017.

[0299] As is known in the art, the term “thermal melting point (Tm)” refers to the temperature, under defined ionic strength, pH, and inhibitory nucleic acid concentration, at which 50% of the inhibitory nucleic acids complementary to the target sequence hybridize to the target sequence at equilibrium. In some embodiments, an inhibitory nucleic acid can bind specifically to a target nucleic acid under stingent conditions, e.g., those in which the salt concentration is at least about 0.01 to 1.0 M Na ion concentration (or other salts) at pH 7.0 to 8.3 and the temperature is at least about 30° C. for short oligonucleotides (e.g., 10 to 50 nucleotide). Stringent conditions can also be achieved with the addition of destabilizing agents such as formamide.

[0300] In some embodiments of any of the inhibitory nucleic acids described herein, the inhibitory nucleic acid binds to a target nucleic acid (e.g., a nucleic acid encoding any one of IL-12A (p35), IL-12B (p40), IL-23 (p19), IL-12R β1, IL-12R β2, or IL-23R) with a Tm of greater than 20° C., greater than 22° C., greater than 24° C., greater than 26° C., greater than 28° C., greater than 30° C., greater than 32° C., greater than 34° C., greater than 36° C., greater than 38° C., greater than 40° C., greater than 42° C., greater than 44° C., greater than 46° C., greater than 48° C., greater than 50° C., greater than 52° C., greater than 54° C., greater than 56° C., greater than 58° C., greater than 60° C., greater than 62° C., greater than 64° C., greater than 66° C., greater than 68° C., greater than 70° C., greater than 72° C., greater than 74° C., greater than 76° C., greater than 78° C., or greater than 80° C., e.g., as measured in phosphate buffered saline using a UV spectrophotometer.

[0301] In some embodiments of any of the inhibitor nucleic acids described herein, the inhibitory nucleic acid binds to a target nucleic acid (e.g., a nucleic acid encoding any one of IL-12A (p35), IL-12B (p40), IL-23 (p19), IL-12R β1, IL-12R β2, or IL-23R) with a Tm of about 20° C. to about 80° C., about 78° C., about 76° C., about 74° C., about 72° C., about 70° C., about 68° C., about 66° C., about 64° C., about 62° C., about 60° C., about 58° C., about 56° C., about 54° C., about 52° C., about 50° C., about 48° C., about 46° C., about 44° C., about 42° C., about 40° C., about 38° C., about 36° C., about 34° C., about 32° C., about 30° C., about 28° C., about 26° C., about 24° C., or about 22° C. (inclusive); about 22° C. to about 80° C., about 78° C., about 76° C., about 74° C., about 72° C., about 70° C., about 68° C., about 66° C., about 64° C., about 62° C., about 60° C., about 58° C., about 56° C., about 54° C., about 52° C., about 50° C., about 48° C., about 46° C., about 44° C., about 42° C., about 40° C., about 38° C., about 36° C., about 34° C., about 32° C., about 30° C., about 28° C., about 26° C., or about 24° C. (inclusive); about 24° C. to about 80° C., about 78° C., about 76° C., about 74° C., about 72° C., about 70° C., about 68° C., about 66° C., about 64° C., about 62° C., about 60° C., about 58° C., about 56° C., about 54° C., about 52° C., about 50° C., about 48° C., about 46° C., about 44° C., about 42° C., about 40° C., about 38° C., about 36° C., about 34° C., about 32° C., about 30° C., about 28° C., or about 26° C. (inclusive); about 26° C. to about 80° C., about 78° C., about 76° C., about 74° C., about 72° C., about 70° C., about 68° C., about 66° C., about 64° C., about 62° C., about 60° C., about 58° C., about 56° C., about 54° C., about 52° C., about 50° C., about 48° C., about 46° C., about 44° C., about 42° C., about 40° C., about 38° C., about 36° C., about 34° C., about 32° C., about 30° C., or about 28° C. (inclusive); about 28° C. to about 80° C., about 78° C., about 76° C., about 74° C., about 72° C., about 70° C., about 68° C., about 66° C., about 64° C., about 62° C., about 60° C., about 58° C., about 56° C., about 54° C., about 52° C., about 50° C., about 48° C., about 46° C., about 44° C., about 42° C., about 40° C., about 38° C., about 36° C., about 34° C., about 32° C., or about 30° C. (inclusive); about 30° C. to about 80° C., about 78° C., about 76° C., about 74° C., about 72° C., about 70° C., about 68° C., about 66° C., about 64° C., about 62° C., about 60° C., about 58° C., about 56° C., about 54° C., about 52° C., about 50° C., about 48° C., about 46° C., about 44° C., about 42° C., about 40° C., about 38° C., about 36° C., about 34° C., or about 32° C. (inclusive); about 32° C. to about 80° C., about 78° C., about 76° C., about 74° C., about 72° C., about 70° C., about 68° C., about 66° C., about 64° C., about 62° C., about 60° C., about 58° C., about 56° C., about 54° C., about 52° C., about 50° C., about 48° C., about 46° C., about 44° C., about 42° C., about 40° C., about 38° C., about 36° C., or about 34° C. (inclusive); about 34° C. to about 80° C., about 78° C., about 76° C., about 74° C., about 72° C., about 70° C., about 68° C., about 66° C., about 64° C., about 62° C., about 60° C., about 58° C., about 56° C., about 54° C., about 52° C., about 50° C., about 48° C., about 46° C., about 44° C., about 42° C., about 40° C., about 38° C., or about 36° C. (inclusive); about 36° C. to about 80° C., about 78° C., about 76° C., about 74° C., about 72° C., about 70° C., about 68° C., about 66° C., about 64° C., about 62° C., about 60° C., about 58° C., about 56° C., about 54° C., about 52° C., about 50° C., about 48° C., about 46° C., about 44° C., about 42° C., about 40° C., or about 38° C. (inclusive); about 38° C. to about 80° C., about 78° C., about 76° C., about 74° C., about 72° C., about 70° C., about 68° C., about 66° C., about 64° C., about 62° C., about 60° C., about 58° C., about 56° C., about 54° C., about 52° C., about 50° C., about 48° C., about 46° C., about 44° C., about 42° C., or about 40° C. (inclusive); about 40° C. to about 80° C., about 78° C., about 76° C., about 74° C., about 72° C., about 70° C., about 68° C., about 66° C., about 64° C., about 62° C., about 60° C., about 58° C., about 56° C., about 54° C., about 52° C., about 50° C., about 48° C., about 46° C., about 44° C., or about 42° C. (inclusive); about 42° C. to about 80° C., about 78° C., about 76° C., about 74° C., about 72° C., about 70° C., about 68° C., about 66° C., about 64° C., about 62° C., about 60° C., about 58° C., about 56° C., about 54° C., about 52° C., about 50° C., about 48° C., about 46° C., or about 44° C. (inclusive); about 44° C. to about 80° C., about 78° C., about 76° C., about 74° C., about 72° C., about 70° C., about 68° C., about 66° C., about 64° C., about 62° C., about 60° C., about 58° C., about 56° C., about 54° C., about 52° C., about 50° C., about 48° C., or about 46° C. (inclusive); about 46° C. to about 80° C., about 78° C., about 76° C., about 74° C., about 72° C., about 70° C., about 68° C., about 66° C., about 64° C., about 62° C., about 60° C., about 58° C., about 56° C., about 54° C., about 52° C., about 50° C., or about 48° C. (inclusive); about 48° C. to about 80° C., about 78° C., about 76° C., about 74° C., about 72° C., about 70° C., about 68° C., about 66° C., about 64° C., about 62° C., about 60° C., about 58° C., about 56° C., about 54° C., about 52° C., or about 50° C. (inclusive); about 50° C. to about 80° C., about 78° C., about 76° C., about 74° C., about 72° C., about 70° C., about 68° C., about 66° C., about 64° C., about 62° C., about 60° C., about 58° C., about 56° C., about 54° C., or about 52° C. (inclusive); about 52° C. to about 80° C., about 78° C., about 76° C., about 74° C., about 72° C., about 70° C., about 68° C., about 66° C., about 64° C., about 62° C., about 60° C., about 58° C., about 56° C., or about 54° C. (inclusive); about 54° C. to about 80° C., about 78° C., about 76° C., about 74° C., about 72° C., about 70° C., about 68° C., about 66° C., about 64° C., about 62° C., about 60° C., about 58° C., or about 56° C. (inclusive); about 56° C. to about 80° C., about 78° C., about 76° C., about 74° C., about 72° C., about 70° C., about 68° C., about 66° C., about 64° C., about 62° C., about 60° C., or about 58° C. (inclusive); about 58° C. to about 80° C., about 78° C., about 76° C., about 74° C., about 72° C., about 70° C., about 68° C., about 66° C., about 64° C., about 62° C., or about 60° C. (inclusive); about 60° C. to about 80° C., about 78° C., about 76° C., about 74° C., about 72° C., about 70° C., about 68° C., about 66° C., about 64° C., or about 62° C. (inclusive); about 62° C. to about 80° C., about 78° C., about 76° C., about 74° C., about 72° C., about 70° C., about 68° C., about 66° C., or about 64° C. (inclusive); about 64° C. to about 80° C., about 78° C., about 76° C., about 74° C., about 72° C., about 70° C., about 68° C., or about 66° C. (inclusive); about 66° C. to about 80° C., about 78° C., about 76° C., about 74° C., about 72° C., about 70° C., or about 68° C. (inclusive); about 68° C. to about 80° C., about 78° C., about 76° C., about 74° C., about 72° C., or about 70° C. (inclusive); about 70° C. to about 80° C., about 78° C., about 76° C., about 74° C., or about 72° C. (inclusive); about 72° C. to about 80° C., about 78° C., about 76° C., or about 74° C. (inclusive); about 74° C. to about 80° C., about 78° C., or about 76° C. (inclusive); about 76° C. to about 80° C. or about 78° C. (inclusive); or about 78° C. to about 80° C. (inclusive),

[0302] In some embodiments, the inhibitory nucleic acid can be formulated in a nanoparticle (e.g., a nanoparticle including one or more synthetic polymers, e.g., Patil et al., Pharmaceutical Nanotechnol. 367:195-203, 2009; Yang et al., ACS Appl. Mater. Interfaces, doi: 10.1021/acsami.6b16556, 2017; Perepelyuk et al., Mol. Ther. Nucleic Acids 6:259-268, 2017). In some embodiments, the nanoparticle can be a mucoadhesive particle (e.g., nanoparticles having a positively-charged exterior surface) (Andersen et al., Methods Mol. Biol. 555:77-86, 2009). In some embodiments, the nanoparticle can have a neutrally-charged exterior surface.

[0303] In some embodiments, the inhibitory nucleic acid can be formulated, e.g., as a liposome (Buyens et al., J. Control Release 158(3): 362-370, 2012; Scarabel et al., Expert Opin. Drug Deliv. 17:1-14, 2017), a micelle (e.g., a mixed micelle) (Tangsangasaksri et al., BioMacromolecules 17:246-255, 2016; Wu et al., Nanotechnology, doi: 10.1088/1361-6528/aa6519, 2017), a microemulsion (WO 11/004395), a nanoemulsion, or a solid lipid nanoparticle (Sahay et al., Nature Biotechnol. 31:653-658, 2013; and Lin et al., Nanomedicine 9(1):105-120, 2014). Additional exemplary structural features of inhibitory nucleic acids and formulations of inhibitory nucleic acids are described in US 2016/0090598.

[0304] In some embodiments, a pharmaceutical composition can include a sterile saline solution and one or more inhibitory nucleic acid (e.g., any of the inhibitory nucleic acids described herein). In some examples, a pharmaceutical composition consists of a sterile saline solution and one or more inhibitory nucleic acid (e.g., any of the inhibitory nucleic acids described herein). In certain embodiments, the sterile saline is a pharmaceutical grade saline. In certain embodiments, a pharmaceutical composition can include one or more inhibitory nucleic acid (e.g., any of the inhibitory nucleic acids described herein) and sterile water. In certain embodiments, a pharmaceutical composition consists of one or more inhibitory nucleic acid (e.g., any of the inhibitory nucleic acids described herein) and sterile water. In certain embodiments, a pharmaceutical composition includes one or more inhibitory nucleic acid (e.g., any of the inhibitory nucleic acids described herein) and phosphate-buffered saline (PBS). In certain embodiments, a pharmaceutical composition consists of one or more inhibitory nucleic acids (e.g., any of the inhibitory nucleic acids described herein) and sterile phosphate-buffered saline (PBS). In some examples, the sterile saline is a pharmaceutical grade PBS.

[0305] In certain embodiments, one or more inhibitory nucleic acids (e.g., any of the inhibitory nucleic acids described herein) may be admixed with pharmaceutically acceptable active and/or inert substances for the preparation of pharmaceutical compositions or formulations. Compositions and methods for the formulation of pharmaceutical compositions depend on a number of criteria, including, but not limited to, route of administration, extent of disease, or dose to be administered.

[0306] Pharmaceutical compositions including one or more inhibitory nucleic acids encompass any pharmaceutically acceptable salts, esters, or salts of such esters. Non-limiting examples of pharmaceutical compositions include pharmaceutically acceptable salts of inhibitory nucleic acids. Suitable pharmaceutically acceptable salts include, but are not limited to, sodium and potassium salts.

[0307] Also provided herein are prodrugs that can include additional nucleosides at one or both ends of an inhibitory nucleic acid which are cleaved by endogenous nucleases within the body, to form the active inhibitory nucleic acid.

[0308] Lipid moieties can be used to formulate an inhibitory nucleic acid. In certain such methods, the inhibitory nucleic acid is introduced into preformed liposomes or lipoplexes made of mixtures of cationic lipids and neutral lipids. In certain methods, inhibitory nucleic acid complexes with mono- or poly-cationic lipids are formed without the presence of a neutral lipid. In certain embodiments, a lipid moiety is selected to increase distribution of an inhibitory nucleic acid to a particular cell or tissue in a mammal. In some examples, a lipid moiety is selected to increase distribution of an inhibitory nucleic acid to fat tissue in a mammal. In certain embodiments, a lipid moiety is selected to increase distribution of an inhibitory nucleic acid to muscle tissue.

[0309] In certain embodiments, pharmaceutical compositions provided herein comprise one or more inhibitory nucleic acid and one or more excipients. In certain such embodiments, excipients are selected from water, salt solutions, alcohol, polyethylene glycols, gelatin, lactose, amylase, magnesium stearate, talc, silicic acid, viscous paraffin, hydroxymethylcellulose and polyvinylpyrrolidone.

[0310] In some examples, a pharmaceutical composition provided herein includes liposomes and emulsions. Liposomes and emulsions can be used to formulate hydrophobic compounds. In some examples, certain organic solvents such as dimethylsulfoxide are used.

[0311] In some examples, a pharmaceutical composition provided herein includes one or more tissue-specific delivery molecules designed to deliver one or more inhibitory nucleic acids to specific tissues or cell types in a mammal. For example, a pharmaceutical composition can include liposomes coated with a tissue-specific antibody.

[0312] In some embodiments, a pharmaceutical composition provided herein can include a co-solvent system. Examples of such co-solvent systems include benzyl alcohol, a nonpolar surfactant, a water-miscible organic polymer, and an aqueous phase. A non-limiting example of such a co-solvent system is the VPD co-solvent system, which is a solution of absolute ethanol comprising 3% w/v benzyl alcohol, 8% w/v of the nonpolar surfactant Polysorbate 80™ and 65% w/v polyethylene glycol 300. As can be appreciated, other surfactants may be used instead of Polysorbate 80™; the fraction size of polyethylene glycol may be varied; other biocompatible polymers may replace polyethylene glycol, e.g., polyvinyl pyrrolidone; and other sugars or polysaccharides may substitute for dextrose.

[0313] In some examples, a pharmaceutical composition can be formulated for oral administration. In some examples, pharmaceutical compositions are formulated for buccal administration.

[0314] In some examples, a pharmaceutical composition is formulated for administration by injection (e.g., intravenous, subcutaneous, intramuscular, etc.). In some of these embodiments, a pharmaceutical composition includes a carrier and is formulated in aqueous solution, such as water or physiologically compatible buffers such as Hanks's solution, Ringer's solution, or physiological saline buffer. In some examples, other ingredients are included (e.g., ingredients that aid in solubility or serve as preservatives). In some examples, injectable suspensions are prepared using appropriate liquid carriers, suspending agents, and the like. Some pharmaceutical compositions for injection are formulated in unit dosage form, e.g., in ampoules or in multi-dose containers. Some pharmaceutical compositions for injection are suspensions, solutions, or emulsions in oily or aqueous vehicles, and may contain formulatory agents such as suspending, stabilizing, and/or dispersing agents. Solvents suitable for use in pharmaceutical compositions for injection include, but are not limited to, lipophilic solvents and fatty oils, such as sesame oil, synthetic fatty acid esters, such as ethyl oleate or triglycerides, and liposomes.

### Antibodies

[0315] In some embodiments, the IL-12/IL-23 inhibitor is an antibody or an antigen-binding fragment thereof (e.g., a Fab or a scFv). In some embodiments, an antibody or antigen-binding fragment described herein binds specifically to any one of IL-12A (p35), IL-12B (p40), IL-23 (p19), IL-12R β1, IL-12R β2, or IL-23R, or a combination thereof.

[0316] In some embodiments, the antibody can be a humanized antibody, a chimeric antibody, a multivalent antibody, or a fragment thereof. In some embodiments, an antibody can be a scFv-Fc, a VHH domain, a VNAR domain, a (scFv)₂, a minibody, or a BiTE. In some embodiments, an antibody can be a DVD-Ig, and a dual-affinity re-targeting antibody (DART), a triomab, kih IgG with a common LC, a crossmab, an ortho-Fab IgG, a 2-in-1-IgG, IgG-ScFv, scFv₂-Fc, a bi-nanobody, tanden antibody, a DART-Fc, a scFv-HAS-scFv, DNL-Fab3, DAF (two-in-one or four-in-one), DutaMab, DT-IgG, knobs-in-holes common LC, knobs-in-holes assembly, charge pair antibody, Fab-arm exchange antibody, SEEDbody, Triomab, LUZ-Y, Fcab, la-body, orthogonal Fab, DVD-IgG, IgG(H)-scFv, scFv-(H)IgG, IgG(L)-scFv, scFv-(L)-IgG, IgG (L,H)-Fc, IgG(H)-V, V(H)—IgG, IgG(L)-V, V(L)-IgG, KIH IgG-scFab, 2scFv-IgG, IgG-2scFv, scFv4-Ig, Zybody, DVI-IgG, nanobody, nanobody-HSA, a diabody, a TandAb, scDiabody, scDiabody-CH3, Diabody-CH3, Triple Body, miniantibody, minibody, TriBi minibody, scFv-CH3 KIH, Fab-scFv, scFv-CH-CL-scFv, F(ab′)2-scFV2, scFv-KIH, Fab-scFv-Fc, tetravalent HCAb, scDiabody-Fc, diabody-Fc, tandem scFv-Fc, intrabody, dock and lock bispecific antibody, ImmTAC, HSAbody, scDiabody-HAS, tandem scFv, IgG-IgG, Cov-X-Body, and scFv1-PEG-scFv2.

[0317] Non-limiting examples of an antigen-binding fragment of an antibody include an Fv fragment, a Fab fragment, a F(ab′)2 fragment, and a Fab′ fragment. Additional examples of an antigen-binding fragment of an antibody is an antigen-binding fragment of an IgG (e.g., an antigen-binding fragment of IgG1, IgG2, IgG3, or IgG4) (e.g., an antigen-binding fragment of a human or humanized IgG, e.g., human or humanized IgG1, IgG2, IgG3, or IgG4); an antigen-binding fragment of an IgA (e.g., an antigen-binding fragment of IgA1 or IgA2) (e.g., an antigen-binding fragment of a human or humanized IgA, e.g., a human or humanized IgA1 or IgA2); an antigen-binding fragment of an IgD (e.g., an antigen-binding fragment of a human or humanized IgD); an antigen-binding fragment of an IgE (e.g., an antigen-binding fragment of a human or humanized IgE); or an antigen-binding fragment of an IgM (e.g., an antigen-binding fragment of a human or humanized IgM).

[0318] In some embodiments, the antibody is a humanized antibody, a chimeric antibody, a multivalent antibody, or a fragment thereof. In some embodiments, the antibody is a monoclonal antibody. In some embodiments, the antibody is a humanized monoclonal antibody. See e.g., Hunter & Jones, Nat. Immunol. 16:448-457, 2015; Heo et al., Oncotarget 7(13):15460-15473, 2016. Additional examples of antibodies and antigen-binding fragments thereof are described in U.S. Pat. Nos. 8,440,196; 7,842,144; 8,034,344; and 8,529,895; US 2013/0317203; US 2014/0322239; US 2015/0166666; US 2016/0152714; and US 2017/0002082, each of which is incorporated by reference in its entirety.

[0319] In some embodiments, the antibody is ustekinumab (CNTO 1275, Stelara®) or a variant thereof (Krueger et al., N. Engl. J. Med. 356(6):580-592, 2007; Kauffman et al., J. Invest. Dermatol. 123(6):1037-1044, 2004; Gottlieb et al., Curr. Med. Res. Opin. 23(5):1081-1092, 2007; Leonardi et al., Lancet 371(9625):1665-1674, 2008; Papp et al., Lancet 371(9625):1675-1684, 2008). In some embodiments, the antibody is briakinumab (ABT-874, J-695) or a variant thereof (Gordon et al., J. Invest. Dermatol. 132(2):304-314, 2012; Kimball et al., Arch Dermatol. 144(2): 200-207, 2008).

[0320] In some embodiments, the antibody is guselkumab (CNTO-1959) (Callis-Duffin et al., J. Am. Acad. Dermatol. 70(5 Suppl 1), 2014); AB162 (Sofen et al., J. Allergy Clin. Immunol. 133: 1032-40, 2014); tildrakizumab (MK-3222, SCH900222) (Papp et al. (2015) Br. J. Dermatol. 2015); Langley et al., Oral Presentation at: American Academy of Dermatology, March 21-25, Denver Colo., 2014); AMG 139 (MEDI2070, brazikumab) (Gomollon, Gastroenterol. Hepatol. 38(Suppl. 1):13-19, 2015; Kock et al., Br. J. Pharmacol. 172(1):159-172, 2015); FM-202 (Tang et al., Immunology 135(2):112-124, 2012); FM-303 (Tang et al., Immunology 135(2):112-124, 2012); ADC-1012 (Tang et al., Immunology 135(2):112-124, 2012); LY-2525623 (Gaffen et al., Nat. Rev. Immunol. 14:585-600, 2014; Sands, Gastroenterol. Hepatol. 12(12):784-786, 2016), LY-3074828 (Coskun et al., Trends Pharmacol. Sci. 38(2):127-142, 2017), BI-655066 (risankizumab) (Singh et al., MAbs 7(4):778-791, 2015; Krueger et al., J. Allergy Clin. Immunol. 136(1):116-124, 2015) or a variant thereof.

[0321] See e.g., Tang et al., Immunology 135(2):112-124, 2012. Further teachings of IL-12/IL-23 antibodies and antigen-binding fragments thereof are described in U.S. Pat. Nos. 6,902,734; 7,247,711; 7,252,971; and 7,491,391; US 2012/0288494; and US 2013/0302343, each of which is incorporated by reference in its entirety.

[0322] In some embodiments, the IL-12/IL-23 inhibitor is PTG-200, an IL-23R inhibitor currently in preclinical development by Protagonist Therapeutics.

[0323] In some embodiments, the IL-12/IL-23 inhibitor is Mirikizumab (LY 3074828), an IL-23R inhibitor currently in clinical development (Phase II) by Eli Lilly. In some embodiments, any of the antibodies or antigen-binding fragments described herein has a dissociation constant (K_{D}) of less than 1×10⁻⁵M (e.g., less than 0.5×10⁻⁵M, less than 1×10⁻⁶ M, less than 0.5×10⁻⁶ M, less than 1×10⁻⁷M, less than 0.5×10⁻⁷M, less than 1×10⁻⁸M, less than 0.5×10⁻⁸M, less than 1×10⁻⁹M, less than 0.5×10⁻⁹M, less than 1×10⁻¹⁰ M, less than 0.5×10⁻¹⁰ M, less than 1×10⁻¹¹M, less than 0.5×10⁻¹¹M, or less than 1×10⁻¹²M), e.g., as measured in phosphate buffered saline using surface plasmon resonance (SPR).

[0324] In some embodiments, any of the antibodies or antigen-binding fragments described herein has a K_{D} of about 1×10⁻¹²M to about 1×10⁻⁵M, about 0.5×10⁻⁵M, about 1×10⁻⁶ M, about 0.5×10⁻⁹ M, about 1×10⁻⁷M, about 0.5×10⁻⁷M, about 1×10⁻⁸M, about 0.5×10⁻⁸ M, about 1×10⁻⁹M, about 0.5×10⁻⁹M, about 1×10⁻¹⁰ M, about 0.5×10⁻¹⁰ M, about 1×10⁻¹¹M, or about 0.5×10⁻¹¹M (inclusive); about 0.5×10⁻¹¹M to about 1×10⁻⁵M, about 0.5×10⁻⁵M, about 1×10⁻⁶ M, about 0.5×10⁻⁶ M, about 1×10⁻⁷M, about 0.5×10⁻⁷M, about 1×10⁻⁸M, about 0.5×10⁻⁸M, about 1×10⁻⁹M, about 0.5×10⁻⁹M, about 1×10⁻¹⁰ M, about 0.5×10⁻¹⁰ M, or about 1×10⁻¹¹M (inclusive); about 1×10⁻¹¹M to about 1×10⁻⁵M, about 0.5×10⁻⁵M, about 1×10⁻⁶ M, about 0.5×10⁻⁶ M, about 1×10⁻⁷M, about 0.5×10⁻⁷M, about 1×10⁻⁸M, about 0.5×10⁻⁸M, about 1×10⁻⁹M, about 0.5×10⁻⁹M, about 1×10⁻¹⁰ M, or about 0.5×10⁻¹⁰ M (inclusive); about 0.5×10⁻¹⁰ M to about 1×10⁻⁵M, about 0.5×10⁻⁵M, about 1×10⁻⁶ M, about 0.5×10⁻⁶ M, about 1×10⁻⁷M, about 0.5×10⁻⁷M, about 1×10⁻⁸M, about 0.5×10⁻⁸M, about 1×10⁻⁹M, about 0.5×10⁻⁹M, or about 1×10⁻¹⁰ M (inclusive); about 1×10⁻¹⁰ M to about 1×10⁻⁵M, about 0.5×10⁻⁵M, about 1×10⁻⁶ M, about 0.5×10⁻⁶ M, about 1×10⁻⁷M, about 0.5×10⁻⁷M, about 1×10⁻⁸M, about 0.5×10⁻⁸M, about 1×10⁻⁹ M, or about 0.5×10⁻⁹M (inclusive); about 0.5×10⁻⁹M to about 1×10⁻⁵M, about 0.5×10⁻⁵ M, about 1×10⁻⁶ M, about 0.5×10⁻⁶ M, about 1×10⁻⁷M, about 0.5×10⁻⁷M, about 1×10⁻⁸ M, about 0.5×10⁻⁸M, or about 1×10⁻⁹M (inclusive); about 1×10⁻⁹M to about 1×10⁻⁵M, about 0.5×10⁻⁵M, about 1×10⁻⁶ M, about 0.5×10⁻⁶ M, about 1×10⁻⁷M, about 0.5×10⁻⁷ M, about 1×10⁻⁸M, or about 0.5×10⁻⁸M (inclusive); about 0.5×10⁻⁸M to about 1×10⁻⁵ M, about 0.5×10⁻⁵M, about 1×10⁻⁶ M, about 0.5×10⁻⁶ M, about 1×10⁻⁷M, about 0.5×10⁻⁷ M, or about 1×10⁻⁸ M (inclusive); about 1×10⁻⁸ M to about 1×10⁻⁵M, about 0.5×10⁻⁵ M, about 1×10⁻⁶ M, about 0.5×10⁻⁶ M, about 1×10⁻⁷ M, or about 0.5×10⁻⁷ M (inclusive); about 0.5×10⁻⁷ M to about 1×10⁻⁵M, about 0.5×10⁻⁵ M, about 1×10⁻⁶ M, about 0.5×10⁻⁶ M, or about 1×10⁻⁷ M (inclusive); about 1×10⁻⁷ M to about 1×10⁻⁵M, about 0.5×10⁻⁵ M, about 1×10⁻⁶ M, or about 0.5×10⁻⁶ M (inclusive); about 0.5×10⁻⁶ M to about 1×10⁻⁵M, about 0.5×10⁻⁵ M, or about 1×10⁻⁶ M (inclusive); about 1×10⁻⁶ M to about 1×10⁻⁵M or about 0.5×10⁻⁵ M (inclusive); or about 0.5×10⁻⁵M to about 1×10⁻⁵M (inclusive), e.g., as measured in phosphate buffered saline using surface plasmon resonance (SPR).

[0325] In some embodiments, any of the antibodies or antigen-binding fragments described herein has a K_{off} of about 1×10⁻⁶ s⁻¹ to about 1×10⁻³ s⁻¹, about 0.5×10⁻³ s⁻¹, about 1×10⁻⁴ s⁻¹, about 0.5×10⁻⁴ s⁻¹, about 1×10⁻⁵ s⁻¹, or about 0.5×10⁻⁵ s⁻¹ (inclusive); about 0.5×10⁻⁵ s⁻¹ to about 1×10⁻³ s⁻¹, about 0.5×10⁻³ s⁻¹, about 1×10⁻⁴ s⁻¹, about 0.5×10⁻⁴ s⁻¹, or about 1×10⁻⁵ s⁻¹ (inclusive); about 1×10⁻⁵ s⁻¹ to about 1×10⁻³ s⁻¹, about 0.5×10⁻³ s⁻¹, about 1×10⁻⁴ s⁻¹, or about 0.5×10⁻⁴ s⁻¹ (inclusive); about 0.5×10⁻⁴ s⁻¹ to about 1×10⁻³ s⁻¹, about 0.5×10⁻³ s⁻¹, or about 1×10⁻⁴ s⁻¹ (inclusive); about 1×10⁻⁴ s⁻¹ to about 1×10⁻³ s⁻¹, or about 0.5×10⁻³ s⁻¹ (inclusive); or about 0.5×10⁻⁵ s⁻¹ to about 1×10⁻³ s⁻¹ (inclusive), e.g., as measured in phosphate buffered saline using surface plasmon resonance (SPR).

[0326] In some embodiments, any of the antibodies or antigen-binding fragments described herein has a Kₒₙ of about 1×10² M⁻¹s⁻¹ to about 1×10⁶ M⁻¹s⁻¹, about 0.5×10⁶ M⁻¹s⁻¹, about 1×10⁵ M⁻¹s⁻¹, about 0.5×10⁵ M⁻¹s⁻¹, about 1×10⁴ M⁻¹s⁻¹, s about 0.5×10⁴ M⁻¹s⁻¹, about 1×10³ M⁻¹s⁻¹, or about 0.5×10³ M⁻¹s⁻¹ (inclusive); about 0.5×10³ M⁻¹s⁻¹ to about 1×10⁶ M⁻¹s⁻¹, about 0.5×10⁶ M⁻¹s⁻¹, about 1×10⁵ M⁻¹s⁻¹, about 0.5×10⁵ M⁻¹s⁻¹, about 1×10⁴ M⁻¹s⁻¹, about 0.5×10⁴ M⁻¹s⁻¹, or about 1×10³ M⁻¹s⁻¹ (inclusive); about 1×10³ M⁻¹s⁻¹ to about 1×10⁶ M⁻¹s⁻¹, about 0.5×10⁶ M⁻¹s⁻¹, about 1×10⁵ M⁻¹s⁻¹, about 0.5×10⁵ M⁻¹s⁻¹, about 1×10⁴ M⁻¹s⁻¹, or about 0.5×10⁴ M⁻¹s⁻¹ (inclusive); about 0.5×10⁴ M⁻¹s⁻¹ to about 1×10⁶ M⁻¹s⁻¹, about 0.5×10⁶ M⁻¹s⁻¹, about 1×10⁵ M⁻¹s⁻¹, about 0.5×10⁵ M⁻¹s⁻¹, or about 1×10⁴ M⁻¹s⁻¹ (inclusive); about 1×10⁴ M⁻¹s⁻¹ to about 1×10⁶ M⁻¹s⁻¹, about 0.5×10⁶ M⁻¹s⁻¹ about 1×10⁵ M⁻¹s⁻¹ or about 0.5×10⁵ M⁻¹s⁻¹ (inclusive); about 0.5×10⁵ M⁻¹s⁻¹ to about 1×10⁶ M⁻¹s⁻¹, about 0.5×10⁶ M⁻¹s⁻¹, or about 1×10⁵ M⁻¹s⁻¹ (inclusive); about 1×10⁵M⁻¹s⁻¹ to about 1×10⁶M⁻¹s⁻¹, or about 0.5×10⁶ M⁻¹s⁻¹ (inclusive); or about 0.5×10⁶ M⁻¹s⁻¹ to about 1×10⁶M⁻¹s⁻¹ (inclusive), e.g., as measured in phosphate buffered saline using surface plasmon resonance (SPR).

### Fusion Proteins

[0327] In some embodiments, the IL-12/IL-23 inhibitor is a fusion protein, a soluble antagonist, or an antimicrobial peptide. In some embodiments, the fusion protein comprises a soluble fragment of a receptor of IL-12 or a soluble fragment of a receptor of IL-23. In some embodiments, the fusion protein comprises an extracellular domain of a receptor of IL-12 or an extracellular domain of a receptor of IL-23.

[0328] In some embodiments, the fusion protein is adnectin or a variant thereof (Tang et al., Immunology 135(2):112-124, 2012). In some embodiments, the soluble antagonist is a human IL-23Ra-chain mRNA transcript (Raymond et al., J. Immunol. 185(12):7302-7308, 2010). In some embodiments, the IL-12/IL-23 is an antimicrobial peptide (e.g., MP-196 (Wenzel et al., PNAS 111(14):E1409-E1418, 2014)).

### Small Molecules

[0329] In some embodiments, the IL-12/IL-23 inhibitor is a small molecule. In some embodiments, the small molecule is STA-5326 (apilimod) or a variant thereof (Keino et al., Arthritis Res. Ther. 10: R122, 2008; Wada et al., Blood 109(3):1156-1164, 2007; Sands et al., Inflamm. Bowel Dis. 16(7):1209-1218, 2010).

### TNFα Inhibitors

[0330] The term “TNFα inhibitor” refers to an agent which directly or indirectly inhibits, impairs, reduces, down-regulates, or blocks TNFα activity and/or expression. In some embodiments, a TNFα inhibitor is an inhibitory nucleic acid, an antibody or an antigen-binding fragment thereof, a fusion protein, a soluble TNFα receptor (a soluble TNFR1 or a soluble TNFR2), or a small molecule TNFα antagonist. In some embodiments, the inhibitory nucleic acid is a ribozyme, small hairpin RNA, a small interfering RNA, an antisense nucleic acid, or an aptamer.

[0331] Exemplary TNFα inhibitors that directly inhibit, impair, reduce, down-regulate, or block TNFα activity and/or expression can, e.g., inhibit or reduce binding of TNFα to its receptor (TNFR1 and/or TNFR2) and/or inhibit or decrease the expression level of TNFα or a receptor of TNFα (TNFR1 or TNFR2) in a cell (e.g., a mammalian cell). Non-limiting examples of TNFα inhibitors that directly inhibit, impair, reduce, down-regulate, or block TNFα activity and/or expression include inhibitory nucleic acids (e.g., any of the examples of inhibitory nucleic acids described herein), an antibody or fragment thereof, a fusion protein, a soluble TNFα receptor (e.g., a soluble TNFR1 or soluble TNFR2), and a small molecule TNFα antagonist.

[0332] Exemplary TNFα inhibitors that can indirectly inhibit, impair, reduce, down-regulate, or block TNFα activity and/or expression can, e.g., inhibit or decrease the level of downstream signaling of a TNFα receptor (e.g., TNFR1 or TNFR2) in a mammalian cell (e.g., decrease the level and/or activity of one or more of the following signaling proteins: TRADD, TRAF2, MEKK1/4, MEKK4/7, JNK, AP-1, ASK1, RIP, MEKK 3/6, MAPK, NIK, IKK, and NF-κB in a mammalian cell), and/or decrease the level of TNFα-induced gene expression in a mammalian cell (e.g., decrease the transcription of genes regulated by, e.g., one or more transcription factors selected from the group of NF-κB, c-Jun, and ATF2). A description of downstream signaling of a TNFα receptor is provided in Wajant et al., Cell Death Differentiation 10:45-65, 2003 (incorporated herein by reference). For example, such indirect TNFα inhibitors can be an inhibitory nucleic acid that targets (decreases the expression) a signaling component downstream of a TNFα receptor (e.g., any one or more of the signaling components downstream of a TNFα receptor described herein or known in the art), a TNFα-induced gene (e.g., any TNFα-induced gene known in the art), or a transcription factor selected from the group of NF-κB, c-Jun, and ATF2.

[0333] In other examples, such indirect TNFα inhibitors can be a small molecule inhibitor of a signaling component downstream of a TNFα receptor (e.g., any of the signaling components downstream of a TNFα receptor described herein or known in the art), a small molecule inhibitor of a protein encoded by a TNFα-induced gene (e.g., any protein encoded by a TNFα-induced gene known in the art), and a small molecule inhibitor of a transcription factor selected from the group of NF-κB, c-Jun, and ATF2.

[0334] In other embodiments, TNFα inhibitors that can indirectly inhibit, impair, reduce, down-regulate, or block one or more components in a mammalian cell (e.g., a macrophage, a CD4+ lymphocyte, a NK cell, a neutrophil, a mast cell, a eosinophil, or a neuron) that are involved in the signaling pathway that results in TNFα mRNA transcription, TNFα mRNA stabilization, and TNFα mRNA translation (e.g., one or more components selected from the group of CD14, MyD88, IRAK, lipopolysaccharide binding protein (LBP), TRAF6, ras, raf, MEK1/2, ERK1/2, NIK, IKK, IκB, NF-κB, rac, MEK4/7, JNK, c-jun, MEK3/6, p38, PKR, TTP, and MK2). For example, such indirect TNFα inhibitors can be an inhibitory nucleic acid that targets (decreases the expression) of a component in a mammalian cell that is involved in the signaling pathway that results in TNFα mRNA transcription, TNFα mRNA stabilization, and TNFα mRNA translation (e.g., a component selected from the group of CD14, MyD88, IRAK, lipopolysaccharide binding protein (LBP), TRAF6, ras, raf, MEK1/2, ERK1/2, NIK, IKK, IκB, NF-κB, rac, MEK4/7, JNK, c-jun, MEK3/6, p38, PKR, TTP, and MK2). In other examples, an indirect TNFα inhibitors is a small molecule inhibitor of a component in a mammalian cell that is involved in the signaling pathway that results in TNFα mRNA transcription, TNFα mRNA stabilization, and TNFα mRNA translation (e.g., a component selected from the group of CD14, MyD88, IRAK, lipopolysaccharide binding protein (LBP), TRAF6, ras, raf, MEK1/2, ERK1/2, NIK, IKK, IκB, NF-κB, rac, MEK4/7, JNK, c-jun, MEK3/6, p38, PKR, TTP, and MK2).

### Inhibitory Nucleic Acids

[0335] Inhibitory nucleic acids that can decrease the expression of TNFα, TNFR1, TNFR2, TRADD, TRAF2, MEKK1/4, MEKK4/7, JNK, AP-1, ASK1, RIP, MEKK 3/6, MAPK, NIK, IKK, NF-κB, CD14, MyD88, IRAK, lipopolysaccharide binding protein (LBP), TRAF6, ras, raf, MEK1/2, ERK1/2, NIK, IKK, IκB, NF-κB, rac, MEK4/7, JNK, c-jun, MEK3/6, p38, PKR, TTP, or MK2 mRNA expression in a mammalian cell include antisense nucleic acid molecules, i.e., nucleic acid molecules whose nucleotide sequence is complementary to all or part of a TNFα, TNFR1, TNFR2, TRADD, TRAF2, MEKK1/4, MEKK4/7, JNK, AP-1, ASK1, RIP, MEKK 3/6, MAPK, NIK, IKK, CD14, MyD88, IRAK, lipopolysaccharide binding protein (LBP), TRAF6, ras, raf, MEK1/2, ERK1/2, NIK, IKK, IκB, NF-κB, rac, MEK4/7, JNK, c-jun, MEK3/6, p38, PKR, TTP, or MK2 mRNA (e.g., complementary to all or a part of any one of SEQ ID NOs: 13-49).

Human TNFα CDS
(SEQ ID NO: 13)
ATGAGCACTGAAAGCATGATCCGGGACGTGGAGCTGGCCGAGGAGGCGCTCCCCAAGAAGACAGGGGGGCCCCAGGGCTCCA
GGCGGTGCTTGTTCCTCAGCCTCTTCTCCTTCCTGATCGTGGCAGGCGCCACCACGCTCTTCTGCCTGCTGCACTTTGGAGT
GATCGGCCCCCAGAGGGAAGAGTTCCCCAGGGACCTCTCTCTAATCAGCCCTCTGGCCCAGGCAGTCAGATCATCTTCTCGA
ACCCCGAGTGACAAGCCTGTAGCCCATGTTGTAGCAAACCCTCAAGCTGAGGGGCAGCTCCAGTGGCTGAACCGCCGGGCCA
ATGCCCTCCTGGCCAATGGCGTGGAGCTGAGAGATAACCAGCTGGTGGTGCCATCAGAGGGCCTGTACCTCATCTACTCCCA
GGTCCTCTTCAAGGGCCAAGGCTGCCCCTCCACCCATGTGCTCCTCACCCACACCATCAGCCGCATCGCCGTCTCCTACCAG
ACCAAGGTCAACCTCCTCTCTGCCATCAAGAGCCCCTGCCAGAGGGAGACCCCAGAGGGGGCTGAGGCCAAGCCCTGGTATG
AGCCCATCTATCTGGGAGGGGTCTTCCAGCTGGAGAAGGGTGACCGACTCAGCGCTGAGATCAATCGGCCCGACTATCTCGA
CTTTGCCGAGTCTGGGCAGGTCTACTTTGGGATCATTGCCCTGTGA
Human TNFR1 CDS
(SEQ ID NO: 14)
ATGGGCCTCTCCACCGTGCCTGACCTGCTGCTGCCGCTGGTGCTCCTGGAGCTGTTGGTGGGAATATACCCCTCAGGGGTTA
TTGGACTGGTCCCTCACCTAGGGGACAGGGAGAAGAGAGATAGTGTGTGTCCCCAAGGAAAATATATCCACCCTCAAAATAA
TTCGATTTGCTGTACCAAGTGCCACAAAGGAACCTACTTGTACAATGACTGTCCAGGCCCGGGGCAGGATACGGACTGCAGG
GAGTGTGAGAGCGGCTCCTTCACCGCTTCAGAAAACCACCTCAGACACTGCCTCAGCTGCTCCAAATGCCGAAAGGAAATGG
GTCAGGTGGAGATCTCTTCTTGCACAGTGGACCGGGACACCGTGTGTGGCTGCAGGAAGAACCAGTACCGGCATTATTGGAG
TGAAAACCTTTTCCAGTGCTTCAATTGCAGCCTCTGCCTCAATGGGACCGTGCACCTCTCCTGCCAGGAGAAACAGAACACC
GTGTGCACCTGCCATGCAGGTTTCTTTCTAAGAGAAAACGAGTGTGTCTCCTGTAGTAACTGTAAGAAAAGCCTGGAGTGCA
CGAAGTTGTGCCTACCCCAGATTGAGAATGTTAAGGGCACTGAGGACTCAGGCACCACAGTGCTGTTGCCCCTGGTCATTTT
CTTTGGTCTTTGCCTTTTATCCCTCCTCTTCATTGGTTTAATGTATCGCTACCAACGGTGGAAGTCCAAGCTCTACTCCATT
GTTTGTGGGAAATCGACACCTGAAAAAGAGGGGGAGCTTGAAGGAACTACTACTAAGCCCCTGGCCCCAAACCCAAGCTTCA
GTCCCACTCCAGGCTTCACCCCCACCCTGGGCTTCAGTCCCGTGCCCAGTTCCACCTTCACCTCCAGCTCCACCTATACCCC
CGGTGACTGTCCCAACTTTGCGGCTCCCCGCAGAGAGGTGGCACCACCCTATCAGGGGGCTGACCCCATCCTTGCGACAGCC
CTCGCCTCCGACCCCATCCCCAACCCCCTTCAGAAGTGGGAGGACAGCGCCCACAAGCCACAGAGCCTAGACACTGATGACC
CCGCGACGCTGTACGCCGTGGTGGAGAACGTGCCCCCGTTGCGCTGGAAGGAATTCGTGCGGCGCCTAGGGCTGAGCGACCA
CGAGATCGATCGGCTGGAGCTGCAGAACGGGCGCTGCCTGCGCGAGGCGCAATACAGCATGCTGGCGACCTGGAGGCGGCGC
ACGCCGCGGCGCGAGGCCACGCTGGAGCTGCTGGGACGCGTGCTCCGCGACATGGACCTGCTGGGCTGCCTGGAGGACATCG
AGGAGGCGCTTTGCGGCCCCGCCGCCCTCCCGCCCGCGCCCAGTCTTCTCAGATGA
Human TNFR2 CDS
(SEQ ID NO: 15)
ATGGCGCCCGTCGCCGTCTGGGCCGCGCTGGCCGTCGGACTGGAGCTCTGGGCTGCGGCGCACGCCTTGCCCGCCCAGGTGG
CATTTACACCCTACGCCCCGGAGCCCGGGAGCACATGCCGGCTCAGAGAATACTATGACCAGACAGCTCAGATGTGCTGCAG
CAAATGCTCGCCGGGCCAACATGCAAAAGTCTTCTGTACCAAGACCTCGGACACCGTGTGTGACTCCTGTGAGGACAGCACA
TACACCCAGCTCTGGAACTGGGTTCCCGAGTGCTTGAGCTGTGGCTCCCGCTGTAGCTCTGACCAGGTGGAAACTCAAGCCT
GCACTCGGGAACAGAACCGCATCTGCACCTGCAGGCCCGGCTGGTACTGCGCGCTGAGCAAGCAGGAGGGGTGCCGGCTGTG
CGCGCCGCTGCGCAAGTGCCGCCCGGGCTTCGGCGTGGCCAGACCAGGAACTGAAACATCAGACGTGGTGTGCAAGCCCTGT
GCCCCGGGGACGTTCTCCAACACGACTTCATCCACGGATATTTGCAGGCCCCACCAGATCTGTAACGTGGTGGCCATCCCTG
GGAATGCAAGCATGGATGCAGTCTGCACGTCCACGTCCCCCACCCGGAGTATGGCCCCAGGGGCAGTACACTTACCCCAGCC
AGTGTCCACACGATCCCAACACACGCAGCCAACTCCAGAACCCAGCACTGCTCCAAGCACCTCCTTCCTGCTCCCAATGGGC
CCCAGCCCCCCAGCTGAAGGGAGCACTGGCGACTTCGCTCTTCCAGTTGGACTGATTGTGGGTGTGACAGCCTTGGGTCTAC
TAATAATAGGAGTGGTGAACTGTGTCATCATGACCCAGGTGAAAAAGAAGCCCTTGTGCCTGCAGAGAGAAGCCAAGGTGCC
TCACTTGCCTGCCGATAAGGCCCGGGGTACACAGGGCCCCGAGCAGCAGCACCTGCTGATCACAGCGCCGAGCTCCAGCAGC
AGCTCCCTGGAGAGCTCGGCCAGTGCGTTGGACAGAAGGGCGCCCACTCGGAACCAGCCACAGGCACCAGGCGTGGAGGCCA
GTGGGGCCGGGGAGGCCCGGGCCAGCACCGGGAGCTCAGATTCTTCCCCTGGTGGCCATGGGACCCAGGTCAATGTCACCTG
CATCGTGAACGTCTGTAGCAGCTCTGACCACAGCTCACAGTGCTCCTCCCAAGCCAGCTCCACAATGGGAGACACAGATTCC
AGCCCCTCGGAGTCCCCGAAGGACGAGCAGGTCCCCTTCTCCAAGGAGGAATGTGCCTTTCGGTCACAGCTGGAGACGCCAG
AGACCCTGCTGGGGAGCACCGAAGAGAAGCCCCTGCCCCTTGGAGTGCCTGATGCTGGGATGAAGCCCAGTTAA
Human TRADD CDS
(SEQ ID NO: 16)
ATGGCAGCTGGGCAAAATGGGCACGAAGAGTGGGTGGGCAGCGCATACCTGTTTGTGGAGTCCTCGCTGGACAAGGTGGTCC
TGTCGGATGCCTACGCGCACCCCCAGCAGAAGGTGGCAGTGTACAGGGCTCTGCAGGCTGCCTTGGCAGAGAGCGGCGGGAG
CCCGGACGTGCTGCAGATGCTGAAGATCCACCGCAGCGACCCGCAGCTGATCGTGCAGCTGCGATTCTGCGGGCGGCAGCCC
TGTGGCCGCTTCCTCCGCGCCTACCGCGAGGGGGCGCTGCGCGCCGCGCTGCAGAGGAGCCTGGCGGCCGCGCTCGCCCAGC
ACTCGGTGCCGCTGCAACTGGAGCTGCGCGCCGGCGCCGAGCGGCTGGACGCTTTGCTGGCGGACGAGGAGCGCTGTTTGAG
TTGCATCCTAGCCCAGCAGCCCGACCGGCTCCGGGATGAAGAACTGGCTGAGCTGGAGGATGCGCTGCGAAATCTGAAGTGC
GGCTCGGGGGCCCGGGGTGGCGACGGGGAGGTCGCTTCGGCCCCCTTGCAGCCCCCGGTGCCCTCTCTGTCGGAGGTGAAGC
CGCCGCCGCCGCCGCCACCTGCCCAGACTTTTCTGTTCCAGGGTCAGCCTGTAGTGAATCGGCCGCTGAGCCTGAAGGACCA
ACAGACGTTCGCGCGCTCTGTGGGTCTCAAATGGCGCAAGGTGGGGCGCTCACTGCAGCGAGGCTGCCGGGCGCTGCGGGAC
CCGGCGCTGGACTCGCTGGCCTACGAGTACGAGCGCGAGGGACTGTACGAGCAGGCCTTCCAGCTGCTGCGGCGCTTCGTGC
AGGCCGAGGGCCGCCGCGCCACGCTGCAGCGCCTGGTGGAGGCACTCGAGGAGAACGAGCTCACCAGCCTGGCAGAGGACTT
GCTGGGCCTGACCGATCCCAATGGCGGCCTGGCCTAG
Human TRAF2 CDS
(SEQ ID NO: 17)
ATGGCTGCAGCTAGCGTGACCCCCCCTGGCTCCCTGGAGTTGCTACAGCCCGGCTTCTCCAAGACCCTCCTGGGGACCAAGC
TGGAAGCCAAGTACCTGTGCTCCGCCTGCAGAAACGTCCTCCGCAGGCCCTTCCAGGCGCAGTGTGGCCACCGGTACTGCTC
CTTCTGCCTGGCCAGCATCCTCAGCTCTGGGCCTCAGAACTGTGCTGCCTGTGTTCACGAGGGCATATATGAAGAAGGCATT
TCTATTTTAGAAAGCAGTTCGGCCTTCCCAGATAATGCTGCCCGCAGGGAGGTGGAGAGCCTGCCGGCCGTCTGTCCCAGTG
ATGGATGCACCTGGAAGGGGACCCTGAAAGAATACGAGAGCTGCCACGAAGGCCGCTGCCCGCTCATGCTGACCGAATGTCC
CGCGTGCAAAGGCCTGGTCCGCCTTGGTGAAAAGGAGCGCCACCTGGAGCACGAGTGCCCGGAGAGAAGCCTGAGCTGCCGG
CATTGCCGGGCACCCTGCTGCGGAGCAGACGTGAAGGCGCACCACGAGGTCTGCCCCAAGTTCCCCTTAACTTGTGACGGCT
GCGGCAAGAAGAAGATCCCCCGGGAGAAGTTTCAGGACCACGTCAAGACTTGTGGCAAGTGTCGAGTCCCTTGCAGATTCCA
CGCCATCGGCTGCCTCGAGACGGTAGAGGGTGAGAAACAGCAGGAGCACGAGGTGCAGTGGCTGCGGGAGCACCTGGCCATG
CTACTGAGCTCGGTGCTGGAGGCAAAGCCCCTCTTGGGAGACCAGAGCCACGCGGGGTCAGAGCTCCTGCAGAGGTGCGAGA
GCCTGGAGAAGAAGACGGCCACTTTTGAGAACATTGTCTGCGTCCTGAACCGGGAGGTGGAGAGGGTGGCCATGACTGCCGA
GGCCTGCAGCCGGCAGCACCGGCTGGACCAAGACAAGATTGAAGCCCTGAGTAGCAAGGTGCAGCAGCTGGAGAGGAGCATT
GGCCTCAAGGACCTGGCGATGGCTGACTTGGAGCAGAAGGTCTTGGAGATGGAGGCATCCACCTACGATGGGGTCTTCATCT
GGAAGATCTCAGACTTCGCCAGGAAGCGCCAGGAAGCTGTGGCTGGCCGCATACCCGCCATCTTCTCCCCAGCCTTCTACAC
CAGCAGGTACGGCTACAAGATGTGTCTGCGTATCTACCTGAACGGCGACGGCACCGGGCGAGGAACACACCTGTCCCTCTTC
TTTGTGGTGATGAAGGGCCCGAATGACGCCCTGCTGCGGTGGCCCTTCAACCAGAAGGTGACCTTAATGCTGCTCGACCAGA
ATAACCGGGAGCACGTGATTGACGCCTTCAGGCCCGACGTGACTTCATCCTCTTTTCAGAGGCCAGTCAACGACATGAACAT
CGCAAGCGGCTGCCCCCTCTTCTGCCCCGTCTCCAAGATGGAGGCAAAGAATTCCTACGTGCGGGACGATGCCATCTTCATC
AAGGCCATTGTGGACCTGACAGGGCTCTAA
Human MEKK1 CDS
(SEQ ID NO: 18)
ATGGCGGCGGCGGCGGGGAATCGCGCCTCGTCGTCGGGATTCCCGGGCGCCAGGGCTACGAGCCCTGAGGCAGGCGGCGGCG
GAGGAGCCCTCAAGGCGAGCAGCGCGCCCGCGGCTGCCGCGGGACTGCTGCGGGAGGCGGGCAGCGGGGGCCGCGAGCGGGC
GGACTGGCGGCGGCGGCAGCTGCGCAAAGTGCGGAGTGTGGAGCTGGACCAGCTGCCTGAGCAGCCGCTCTTCCTTGCCGCC
TCACCGCCGGCCTCCTCGACTTCCCCGTCGCCGGAGCCCGCGGACGCAGCGGGGAGTGGGACCGGCTTCCAGCCTGTGGCGG
TGCCGCCGCCCCACGGAGCCGCGAGCCGCGGCGGCGCCCACCTTACCGAGTCGGTGGCGGCGCCGGACAGCGGCGCCTCGAG
TCCCGCAGCGGCCGAGCCCGGGGAGAAGCGGGCGCCCGCCGCCGAGCCGTCTCCTGCAGCGGCCCCCGCCGGTCGTGAGATG
GAGAATAAAGAAACTCTCAAAGGGTTGCACAAGATGGATGATCGTCCAGAGGAACGAATGATCAGGGAGAAACTGAAGGCAA
CCTGTATGCCAGCCTGGAAGCACGAATGGTTGGAAAGGAGAAATAGGCGAGGGCCTGTGGTGGTAAAACCAATCCCAGTTAA
AGGAGATGGATCTGAAATGAATCACTTAGCAGCTGAGTCTCCAGGAGAGGTCCAGGCAAGTGCGGCTTCACCAGCTTCCAAA
GGCCGACGCAGTCCTTCTCCTGGCAACTCCCCATCAGGTCGCACAGTGAAATCAGAATCTCCAGGAGTAAGGAGAAAAAGAG
TTTCCCCAGTGCCTTTTCAGAGTGGCAGAATCACACCACCCCGAAGAGCCCCTTCACCAGATGGCTTCTCACCATATAGCCC
TGAGGAAACAAACCGCCGTGTTAACAAAGTGATGCGGGCCAGACTGTACTTACTGCAGCAGATAGGGCCTAACTCTTTCCTG
ATTGGAGGAGACAGCCCAGACAATAAATACCGGGTGTTTATTGGGCCTCAGAACTGCAGCTGTGCACGTGGAACATTCTGTA
TTCATCTGCTATTTGTGATGCTCCGGGTGTTTCAACTAGAACCTTCAGACCCAATGTTATGGAGAAAAACTTTAAAGAATTT
TGAGGTTGAGAGTTTGTTCCAGAAATATCACAGTAGGCGTAGCTCAAGGATCAAAGCTCCATCTCGTAACACCATCCAGAAG
TTTGTTTCACGCATGTCAAATTCTCATACATTGTCATCATCTAGTACTTCTACGTCTAGTTCAGAAAACAGCATAAAGGATG
AAGAGGAACAGATGTGTCCTATTTGCTTGTTGGGCATGCTTGATGAAGAAAGTCTTACAGTGTGTGAAGACGGCTGCAGGAA
CAAGCTGCACCACCACTGCATGTCAATTTGGGCAGAAGAGTGTAGAAGAAATAGAGAACCTTTAATATGTCCCCTTTGTAGA
TCTAAGTGGAGATCTCATGATTTCTACAGCCACGAGTTGTCAAGTCCTGTGGATTCCCCTTCTTCCCTCAGAGCTGCACAGC
AGCAAACCGTACAGCAGCAGCCTTTGGCTGGATCACGAAGGAATCAAGAGAGCAATTTTAACCTTACTCATTATGGAACTCA
GCAAATCCCTCCTGCTTACAAAGATTTAGCTGAGCCATGGATTCAGGTGTTTGGAATGGAACTCGTTGGCTGCTTATTTTCT
AGAAACTGGAATGTGAGAGAGATGGCCCTCAGGCGTCTTTCCCATGATGTCAGTGGGGCCCTGCTGTTGGCAAATGGGGAGA
GCACTGGAAATTCTGGGGGCAGCAGTGGAAGCAGCCCGAGTGGGGGAGCCACCAGTGGGTCTTCCCAGACCAGTATCTCAGG
AGATGTGGTGGAGGCATGCTGCAGCGTTCTGTCAATGGTCTGTGCTGACCCTGTCTACAAAGTGTACGTTGCTGCTTTAAAA
ACATTGAGAGCCATGCTGGTATATACTCCTTGCCACAGTTTAGCGGAAAGAATCAAACTTCAGAGACTTCTCCAGCCAGTTG
TAGACACCATCCTAGTCAAATGTGCAGATGCCAATAGCCGCACAAGTCAGCTGTCCATATCAACACTGTTGGAACTGTGCAA
AGGCCAAGCAGGAGAGTTGGCAGTTGGCAGAGAAATACTAAAAGCTGGATCCATTGGTATTGGTGGTGTTGATTATGTCTTA
AATTGTATTCTTGGAAACCAAACTGAATCAAACAATTGGCAAGAACTTCTTGGCCGCCTTTGTCTTATAGATAGACTGTTGT
TGGAATTTCCTGCTGAATTTTATCCTCATATTGTCAGTACTGATGTTTCACAAGCTGAGCCTGTTGAAATCAGGTATAAGAA
GCTGCTGTCCCTCTTAACCTTTGCTTTGCAGTCCATTGATAATTCCCACTCAATGGTTGGCAAACTTTCCAGAAGGATCTAC
TTGAGTTCTGCAAGAATGGTTACTACAGTACCCCATGTGTTTTCAAAACTGTTAGAAATGCTGAGTGTTTCCAGTTCCACTC
ACTTCACCAGGATGCGTCGCCGTTTGATGGCTATTGCAGATGAGGTGGAAATTGCCGAAGCCATCCAGTTGGGCGTAGAAGA
CACTTTGGATGGTCAACAGGACAGCTTCTTGCAGGCATCTGTTCCCAACAACTATCTGGAAACCACAGAGAACAGTTCCCCT
GAGTGCACAGTCCATTTAGAGAAAACTGGAAAAGGATTATGTGCTACAAAATTGAGTGCCAGTTCAGAGGACATTTCTGAGA
GACTGGCCAGCATTTCAGTAGGACCTTCTAGTTCAACAACAACAACAACAACAACAACAGAGCAACCAAAGCCAATGGTTCA
AACAAAAGGCAGACCCCACAGTCAGTGTTTGAACTCCTCTCCTTTATCTCATCATTCCCAATTAATGTTTCCAGCCTTGTCA
ACCCCTTCTTCTTCTACCCCATCTGTACCAGCTGGCACTGCAACAGATGTCTCTAAGCATAGACTTCAGGGATTCATTCCCT
GCAGAATACCTTCTGCATCTCCTCAAACACAGCGCAAGTTTTCTCTACAATTCCACAGAAACTGTCCTGAAAACAAAGACTC
AGATAAACTTTCCCCAGTCTTTACTCAGTCAAGACCCTTGCCCTCCAGTAACATACACAGGCCAAAGCCATCTAGACCTACC
CCAGGTAATACAAGTAAACAGGGAGATCCCTCAAAAAATAGCATGACACTTGATCTGAACAGTAGTTCCAAATGTGATGACA
GCTTTGGCTGTAGCAGCAATAGTAGTAATGCTGTTATACCCAGTGACGAGACAGTGTTCACCCCAGTAGAGGAGAAATGCAG
ATTAGATGTCAATACAGAGCTCAACTCCAGTATTGAGGACCTTCTTGAAGCATCTATGCCTTCAAGTGATACAACAGTAACT
TTTAAGTCAGAAGTTGCTGTCCTGTCTCCTGAAAAGGCTGAAAATGATGATACCTACAAAGATGATGTGAATCATAATCAAA
AGTGCAAAGAGAAGATGGAAGCTGAAGAAGAAGAAGCTTTAGCAATTGCCATGGCAATGTCAGCGTCTCAGGATGCCCTCCC
CATAGTTCCTCAGCTGCAGGTTGAAAATGGAGAAGATATCATCATTATTCAACAGGATACACCAGAGACTCTACCAGGACAT
ACCAAAGCAAAACAACCGTATAGAGAAGACACTGAATGGCTGAAAGGTCAACAGATAGGCCTTGGAGCATTTTCTTCTTGTT
ATCAGGCTCAAGATGTGGGAACTGGAACTTTAATGGCTGTTAAACAGGTGACTTATGTCAGAAACACATCTTCTGAGCAAGA
AGAAGTAGTAGAAGCACTAAGAGAAGAGATAAGAATGATGAGCCATCTGAATCATCCAAACATCATTAGGATGTTGGGAGCC
ACGTGTGAGAAGAGCAATTACAATCTCTTCATTGAATGGATGGCAGGGGGATCGGTGGCTCATTTGCTGAGTAAATATGGAG
CCTTCAAAGAATCAGTAGTTATTAACTACACTGAACAGTTACTCCGTGGCCTTTCGTATCTCCATGAAAACCAAATCATTCA
CAGAGATGTCAAAGGTGCCAATTTGCTAATTGACAGCACTGGTCAGAGACTAAGAATTGCAGATTTTGGAGCTGCAGCCAGG
TTGGCATCAAAAGGAACTGGTGCAGGAGAGTTTCAGGGACAATTACTGGGGACAATTGCATTTATGGCACCTGAGGTACTAA
GAGGTCAACAGTATGGAAGGAGCTGTGATGTATGGAGTGTTGGCTGTGCTATTATAGAAATGGCTTGTGCAAAACCACCATG
GAATGCAGAAAAACACTCCAATCATCTTGCTTTGATATTTAAGATTGCTAGTGCAACTACTGCTCCATCGATCCCTTCACAT
TTGTCTCCTGGTTTACGAGATGTGGCTCTTCGTTGTTTAGAACTTCAACCTCAGGACAGACCTCCATCAAGAGAGCTACTGA
AGCATCCAGTCTTTCGTACTACATGGTAG
Human MEKK4 CDS
(SEQ ID NO: 19)
ATGAGAGAAGCCGCTGCCGCGCTGGTCCCTCCTCCCGCCTTTGCCGTCACGCCTGCCGCCGCCATGGAGGAGCCGCCGCCAC
CGCCGCCGCCGCCACCACCGCCACCGGAACCCGAGACCGAGTCAGAACCCGAGTGCTGCTTGGCGGCGAGGCAAGAGGGCAC
ATTGGGAGATTCAGCTTGCAAGAGTCCTGAATCTGATCTAGAAGACTTCTCCGATGAAACAAATACAGAGAATCTTTATGGT
ACCTCTCCCCCCAGCACACCTCGACAGATGAAACGCATGTCAACCAAACATCAGAGGAATAATGTGGGGAGGCCAGCCAGTC
GGTCTAATTTGAAAGAAAAAATGAATGCACCAAATCAGCCTCCACATAAAGACACTGGAAAAACAGTGGAGAATGTGGAAGA
ATACAGCTATAAGCAGGAGAAAAAGATCCGAGCAGCTCTTAGAACAACAGAGCGTGATCATAAAAAAAATGTACAGTGCTCA
TTCATGTTAGACTCAGTGGGTGGATCTTTGCCAAAAAAATCAATTCCAGATGTGGATCTCAATAAGCCTTACCTCAGCCTTG
GCTGTAGCAATGCTAAGCTTCCAGTATCTGTGCCCATGCCTATAGCCAGACCTGCACGCCAGACTTCTAGGACTGACTGTCC
AGCAGATCGTTTAAAGTTTTTTGAAACTTTACGACTTTTGCTAAAGCTTACCTCAGTCTCAAAGAAAAAAGACAGGGAGCAA
AGAGGACAAGAAAATACGTCTGGTTTCTGGCTTAACCGATCTAACGAACTGATCTGGTTAGAGCTACAAGCCTGGCATGCAG
GACGGACAATTAACGACCAGGACTTCTTTTTATATACAGCCCGTCAAGCCATCCCAGATATTATTAATGAAATCCTTACTTT
CAAAGTCGACTATGGGAGCTTCGCCTTTGTTAGAGATAGAGCTGGTTTTAATGGTACTTCAGTAGAAGGGCAGTGCAAAGCC
ACTCCTGGAACAAAGATTGTAGGTTACTCAACACATCATGAGCATCTCCAACGCCAGAGGGTCTCATTTGAGCAGGTAAAAC
GGATAATGGAGCTGCTAGAGTACATAGAAGCACTTTATCCATCATTGCAGGCTCTTCAGAAGGACTATGAAAAATATGCTGC
AAAAGACTTCCAGGACAGGGTGCAGGCACTCTGTTTGTGGTTAAACATCACAAAAGACTTAAATCAGAAATTAAGGATTATG
GGCACTGTTTTGGGCATCAAGAATTTATCAGACATTGGCTGGCCAGTGTTTGAAATCCCTTCCCCTCGACCATCCAAAGGTA
ATGAGCCGGAGTATGAGGGTGATGACACAGAAGGAGAATTAAAGGAGTTGGAAAGTAGTACGGATGAGAGTGAAGAAGAACA
AATCTCTGATCCTAGGGTACCGGAAATCAGACAGCCCATAGATAACAGCTTCGACATCCAGTCGCGGGACTGCATATCCAAG
AAGCTTGAGAGGCTCGAATCTGAGGATGATTCTCTTGGCTGGGGAGCACCAGACTGGAGCACAGAAGCAGGCTTTAGTAGAC
ATTGTCTGACTTCTATTTATAGACCATTTGTAGACAAAGCACTGAAGCAGATGGGGTTAAGAAAGTTAATTTTAAGACTTCA
CAAGCTAATGGATGGTTCCTTGCAAAGGGCACGTATAGCATTGGTAAAGAACGATCGTCCAGTGGAGTTTTCTGAATTTCCA
GATCCCATGTGGGGTTCAGATTATGTGCAGTTGTCAAGGACACCACCTTCATCTGAGGAGAAATGCAGTGCTGTGTCGTGGG
AGGAGCTGAAGGCCATGGATTTACCTTCATTCGAACCTGCCTTCCTAGTTCTCTGCCGAGTCCTTCTGAATGTCATACATGA
GTGTCTGAAGTTAAGATTGGAGCAGAGACCTGCTGGAGAACCATCTCTCTTGAGTATTAAGCAGCTGGTGAGAGAGTGTAAG
GAGGTCCTGAAGGGCGGCCTGCTGATGAAGCAGTACTACCAGTTCATGCTGCAGGAGGTTCTGGAGGACTTGGAGAAGCCCG
ACTGCAACATTGACGCTTTTGAAGAGGATCTACATAAAATGCTTATGGTGTATTTTGATTACATGAGAAGCTGGATCCAAAT
GCTACAGCAATTACCTCAAGCATCGCATAGTTTAAAAAATCTGTTAGAAGAAGAATGGAATTTCACCAAAGAAATAACTCAT
TACATACGGGGAGGAGAAGCACAGGCCGGGAAGCTTTTCTGTGACATTGCAGGAATGCTGCTGAAATCTACAGGAAGTTTTT
TAGAATTTGGCTTACAGGAGAGCTGTGCTGAATTTTGGACTAGTGCGGATGACAGCAGTGCTTCCGACGAAATCAGGAGGTC
TGTTATAGAGATCAGTCGAGCCCTGAAGGAGCTCTTCCATGAAGCCAGAGAAAGGGCTTCCAAAGCACTTGGATTTGCTAAA
ATGTTGAGAAAGGACCTGGAAATAGCAGCAGAATTCAGGCTTTCAGCCCCAGTTAGAGACCTCCTGGATGTTCTGAAATCAA
AACAGTATGTCAAGGTGCAAATTCCTGGGTTAGAAAACTTGCAAATGTTTGTTCCAGACACTCTTGCTGAGGAGAAGAGTAT
TATTTTGCAGTTACTCAATGCAGCTGCAGGAAAGGACTGTTCAAAAGATTCAGATGACGTACTCATCGATGCCTATCTGCTT
CTGACCAAGCACGGTGATCGAGCCCGTGATTCAGAGGACAGCTGGGGCACCTGGGAGGCACAGCCTGTCAAAGTCGTGCCTC
AGGTGGAGACTGTTGACACCCTGAGAAGCATGCAGGTGGATAATCTTTTACTAGTTGTCATGCAGTCTGCGCATCTCACAAT
TCAGAGAAAAGCTTTCCAGCAGTCCATTGAGGGACTTATGACTCTGTGCCAGGAGCAGACATCCAGTCAGCCGGTCATCGCC
AAAGCTTTGCAGCAGCTGAAGAATGATGCATTGGAGCTATGCAACAGGATAAGCAATGCCATTGACCGCGTGGACCACATGT
TCACATCAGAATTTGATGCTGAGGTTGATGAATCTGAATCTGTCACCTTGCAACAGTACTACCGAGAAGCAATGATTCAGGG
GTACAATTTTGGATTTGAGTATCATAAAGAAGTTGTTCGTTTGATGTCTGGGGAGTTTAGACAGAAGATAGGAGACAAATAT
ATAAGCTTTGCCCGGAAGTGGATGAATTATGTCCTGACTAAATGTGAGAGTGGTAGAGGTACAAGACCCAGGTGGGCGACTC
AAGGATTTGATTTTCTACAAGCAATTGAACCTGCCTTTATTTCAGCTTTACCAGAAGATGACTTCTTGAGTTTACAAGCCTT
GATGAATGAATGCATTGGCCATGTCATAGGAAAACCACACAGTCCTGTTACAGGTTTGTACCTTGCCATTCATCGGAACAGC
CCCCGTCCTATGAAGGTACCTCGATGCCATAGTGACCCTCCTAACCCACACCTCATTATCCCCACTCCAGAGGGATTCAGCA
CTCGGAGCATGCCTTCCGACGCGCGGAGCCATGGCAGCCCTGCTGCTGCTGCTGCTGCTGCTGCTGCTGCTGTTGCTGCCAG
TCGGCCCAGCCCCTCTGGTGGTGACTCTGTGCTGCCCAAATCCATCAGCAGTGCCCATGATACCAGGGGTTCCAGCGTTCCT
GAAAATGATCGATTGGCTTCCATAGCTGCTGAATTGCAGTTTAGGTCCCTGAGTCGTCACTCAAGCCCCACGGAGGAGCGAG
ATGAACCAGCATATCCAAGAGGAGATTCAAGTGGGTCCACAAGAAGAAGTTGGGAACTTCGGACACTAATCAGCCAGAGTAA
AGATACTGCTTCTAAACTAGGACCCATAGAAGCTATCCAGAAGTCAGTCCGATTGTTTGAAGAAAAGAGGTACCGAGAAATG
AGGAGAAAGAATATCATTGGTCAAGTTTGTGATACGCCTAAGTCCTATGATAATGTTATGCACGTTGGCTTGAGGAAGGTGA
CCTTCAAATGGCAAAGAGGAAACAAAATTGGAGAAGGCCAGTATGGGAAGGTGTACACCTGCATCAGCGTCGACACCGGGGA
GCTGATGGCCATGAAAGAGATTCGATTTCAACCTAATGACCATAAGACTATCAAGGAAACTGCAGACGAATTGAAAATATTC
GAAGGCATCAAACACCCCAATCTGGTTCGGTATTTTGGTGTGGAGCTCCATAGAGAAGAAATGTACATCTTCATGGAGTACT
GCGATGAGGGGACTTTAGAAGAGGTGTCAAGGCTGGGACTTCAGGAACATGTGATTAGGCTGTATTCAAAGCAGATCACCAT
TGCGATCAACGTCCTCCATGAGCATGGCATAGTCCACCGTGACATTAAAGGTGCCAATATCTTCCTTACCTCATCTGGATTA
ATCAAACTGGGAGATTTTGGATGTTCAGTAAAGCTCAAAAACAATGCCCAGACCATGCCTGGTGAAGTGAACAGCACCCTGG
GGACAGCAGCATACATGGCACCTGAAGTCATCACTCGTGCCAAAGGAGAGGGCCATGGGCGTGCGGCCGACATCTGGAGTCT
GGGGTGTGTTGTCATAGAGATGGTGACTGGCAAGAGGCCTTGGCATGAGTATGAGCACAACTTTCAAATTATGTATAAAGTG
GGGATGGGACATAAGCCACCAATCCCTGAAAGATTAAGCCCTGAAGGAAAGGACTTCCTTTCTCACTGCCTTGAGAGTGACC
CAAAGATGAGATGGACCGCCAGCCAGCTCCTCGACCATTCGTTTGTCAAGGTTTGCACAGATGAAGAATGA
Human MEKK7 CDS
(SEQ ID NO: 20)
ATGTCTACAGCCTCTGCCGCCTCCTCCTCCTCCTCGTCTTCGGCCGGTGAGATGATCGAAGCCCCTTCCCAGGTCCTCAACT
TTGAAGAGATCGACTACAAGGAGATCGAGGTGGAAGAGGTTGTTGGAAGAGGAGCCTTTGGAGTTGTTTGCAAAGCTAAGTG
GAGAGCAAAAGATGTTGCTATTAAACAAATAGAAAGTGAATCTGAGAGGAAAGCGTTTATTGTAGAGCTTCGGCAGTTATCC
CGTGTGAACCATCCTAATATTGTAAAGCTTTATGGAGCCTGCTTGAATCCAGTGTGTCTTGTGATGGAATATGCTGAAGGGG
GCTCTTTATATAATGTGCTGCATGGTGCTGAACCATTGCCATATTATACTGCTGCCCACGCAATGAGTTGGTGTTTACAGTG
TTCCCAAGGAGTGGCTTATCTTCACAGCATGCAACCCAAAGCGCTAATTCACAGGGACCTGAAACCACCAAACTTACTGCTG
GTTGCAGGGGGGACAGTTCTAAAAATTTGTGATTTTGGTACAGCCTGTGACATTCAGACACACATGACCAATAACAAGGGGA
GTGCTGCTTGGATGGCACCTGAAGTTTTTGAAGGTAGTAATTACAGTGAAAAATGTGACGTCTTCAGCTGGGGTATTATTCT
TTGGGAAGTGATAACGCGTCGGAAACCCTTTGATGAGATTGGTGGCCCAGCTTTCCGAATCATGTGGGCTGTTCATAATGGT
ACTCGACCACCACTGATAAAAAATTTACCTAAGCCCATTGAGAGCCTGATGACTCGTTGTTGGTCTAAAGATCCTTCCCAGC
GCCCTTCAATGGAGGAAATTGTGAAAATAATGACTCACTTGATGCGGTACTTTCCAGGAGCAGATGAGCCATTACAGTATCC
TTGTCAGTATTCAGATGAAGGACAGAGCAACTCTGCCACCAGTACAGGCTCATTCATGGACATTGCTTCTACAAATACGAGT
AACAAAAGTGACACTAATATGGAGCAAGTTCCTGCCACAAATGATACTATTAAGCGCTTAGAATCAAAATTGTTGAAAAATC
AGGCAAAGCAACAGAGTGAATCTGGACGTTTAAGCTTGGGAGCCTCCCGTGGGAGCAGTGTGGAGAGCTTGCCCCCAACCTC
TGAGGGCAAGAGGATGAGTGCTGACATGTCTGAAATAGAAGCTAGGATCGCCGCAACCACAGGCAACGGACAGCCAAGACGT
AGATCCATCCAAGACTTGACTGTAACTGGAACAGAACCTGGTCAGGTGAGCAGTAGGTCATCCAGTCCCAGTGTCAGAATGA
TTACTACCTCAGGACCAACCTCAGAAAAGCCAACTCGAAGTCATCCATGGACCCCTGATGATTCCACAGATACCAATGGATC
AGATAACTCCATCCCAATGGCTTATCTTACACTGGATCACCAACTACAGCCTCTAGCACCGTGCCCAAACTCCAAAGAATCT
ATGGCAGTGTTTGAACAGCATTGTAAAATGGCACAAGAATATATGAAAGTTCAAACAGAAATTGCATTGTTATTACAGAGAA
AGCAAGAACTAGTTGCAGAACTGGACCAGGATGAAAAGGACCAGCAAAATACATCTCGCCTGGTACAGGAACATAAAAAGCT
TTTAGATGAAAACAAAAGCCTTTCTACTTACTACCAGCAATGCAAAAAACAACTAGAGGTCATCAGAAGTCAGCAGCAGAAA
CGACAAGGCACTTCATGA
Human JNK CDS
(SEQ ID NO: 21)
ATGAGCAGAAGCAAGCGTGACAACAATTTTTATAGTGTAGAGATTGGAGATTCTACATTCACAGTCCTGAAACGATATCAGA
ATTTAAAACCTATAGGCTCAGGAGCTCAAGGAATAGTATGCGCAGCTTATGATGCCATTCTTGAAAGAAATGTTGCAATCAA
GAAGCTAAGCCGACCATTTCAGAATCAGACTCATGCCAAGCGGGCCTACAGAGAGCTAGTTCTTATGAAATGTGTTAATCAC
AAAAATATAATTGGCCTTTTGAATGTTTTCACACCACAGAAATCCCTAGAAGAATTTCAAGATGTTTACATAGTCATGGAGC
TCATGGATGCAAATCTTTGCCAAGTGATTCAGATGGAGCTAGATCATGAAAGAATGTCCTACCTTCTCTATCAGATGCTGTG
TGGAATCAAGCACCTTCATTCTGCTGGAATTATTCATCGGGACTTAAAGCCCAGTAATATAGTAGTAAAATCTGATTGCACT
TTGAAGATTCTTGACTTCGGTCTGGCCAGGACTGCAGGAACGAGTTTTATGATGACGCCTTATGTAGTGACTCGCTACTACA
GAGCACCCGAGGTCATCCTTGGCATGGGCTACAAGGAAAACGTTGACATTTGGTCAGTTGGGTGCATCATGGGAGAAATGAT
CAAAGGTGGTGTTTTGTTCCCAGGTACAGATCATATTGATCAGTGGAATAAAGTTATTGAACAGCTTGGAACACCATGTCCT
GAATTCATGAAGAAACTGCAACCAACAGTAAGGACTTACGTTGAAAACAGACCTAAATATGCTGGATATAGCTTTGAGAAAC
TCTTCCCTGATGTCCTTTTCCCAGCTGACTCAGAACACAACAAACTTAAAGCCAGTCAGGCAAGGGATTTGTTATCCAAAAT
GCTGGTAATAGATGCATCTAAAAGGATCTCTGTAGATGAAGCTCTCCAACACCCGTACATCAATGTCTGGTATGATCCTTCT
GAAGCAGAAGCTCCACCACCAAAGATCCCTGACAAGCAGTTAGATGAAAGGGAACACACAATAGAAGAGTGGAAAGAATTGA
TATATAAGGAAGTTATGGACTTGGAGGAGAGAACCAAGAATGGAGTTATACGGGGGCAGCCCTCTCCTTTAGGTGCAGCAGT
GATCAATGGCTCTCAGCATCCATCATCATCGTCGTCTGTCAATGATGTGTCTTCAATGTCAACAGATCCGACTTTGGCCTCT
GATACAGACAGCAGTCTAGAAGCAGCAGCTGGGCCTCTGGGCTGCTGTAGATGA
Human AP-1 CDS
(SEQ ID NO: 22)
ATGACTGCAAAGATGGAAACGACCTTCTATGACGATGCCCTCAACGCCTCGTTCCTCCCGTCCGAGAGCGGACCTTATGGCT
ACAGTAACCCCAAGATCCTGAAACAGAGCATGACCCTGAACCTGGCCGACCCAGTGGGGAGCCTGAAGCCGCACCTCCGCGC
CAAGAACTCGGACCTCCTCACCTCGCCCGACGTGGGGCTGCTCAAGCTGGCGTCGCCCGAGCTGGAGCGCCTGATAATCCAG
TCCAGCAACGGGCACATCACCACCACGCCGACCCCCACCCAGTTCCTGTGCCCCAAGAACGTGACAGATGAGCAGGAGGGCT
TCGCCGAGGGCTTCGTGCGCGCCCTGGCCGAACTGCACAGCCAGAACACGCTGCCCAGCGTCACGTCGGCGGCGCAGCCGGT
CAACGGGGCAGGCATGGTGGCTCCCGCGGTAGCCTCGGTGGCAGGGGGCAGCGGCAGCGGCGGCTTCAGCGCCAGCCTGCAC
AGCGAGCCGCCGGTCTACGCAAACCTCAGCAACTTCAACCCAGGCGCGCTGAGCAGCGGCGGCGGGGCGCCCTCCTACGGCG
CGGCCGGCCTGGCCTTTCCCGCGCAACCCCAGCAGCAGCAGCAGCCGCCGCACCACCTGCCCCAGCAGATGCCCGTGCAGCA
CCCGCGGCTGCAGGCCCTGAAGGAGGAGCCTCAGACAGTGCCCGAGATGCCCGGCGAGACACCGCCCCTGTCCCCCATCGAC
ATGGAGTCCCAGGAGCGGATCAAGGCGGAGAGGAAGCGCATGAGGAACCGCATCGCTGCCTCCAAGTGCCGAAAAAGGAAGC
TGGAGAGAATCGCCCGGCTGGAGGAAAAAGTGAAAACCTTGAAAGCTCAGAACTCGGAGCTGGCGTCCACGGCCAACATGCT
CAGGGAACAGGTGGCACAGCTTAAACAGAAAGTCATGAACCACGTTAACAGTGGGTGCCAACTCATGCTAACGCAGCAGTTG
CAAACATTTTGA
Human ASK1 CDS
(SEQ ID NO: 23)
ATGAGCACGGAGGCGGACGAGGGCATCACTTTCTCTGTGCCACCCTTCGCCCCCTCGGGCTTCTGCACCATCCCCGAGGGCG
GCATCTGCAGGAGGGGAGGAGCGGCGGCGGTGGGCGAGGGCGAGGAGCACCAGCTGCCACCGCCGCCGCCGGGCAGCTTCTG
GAACGTGGAGAGCGCCGCTGCCCCTGGCATCGGTTGTCCGGCGGCCACCTCCTCGAGCAGTGCCACCCGAGGCCGGGGCAGC
TCTGTTGGCGGGGGCAGCCGACGGACCACGGTGGCATATGTGATCAACGAAGCGAGCCAAGGGCAACTGGTGGTGGCCGAGA
GCGAGGCCCTGCAGAGCTTGCGGGAGGCGTGCGAGACAGTGGGCGCCACCCTGGAAACCCTGCATTTTGGGAAACTCGACTT
TGGAGAAACCACCGTGCTGGACCGCTTTTACAATGCAGATATTGCGGTGGTGGAGATGAGCGATGCCTTCCGGCAGCCGTCC
TTGTTTTACCACCTTGGGGTGAGAGAAAGTTTCAGCATGGCCAACAACATCATCCTCTACTGTGATACTAACTCGGACTCTC
TGCAGTCACTGAAGGAAATAATTTGCCAGAAGAATACTATGTGCACTGGGAACTACACCTTTGTTCCTTACATGATAACTCC
ACATAACAAAGTCTACTGCTGTGACAGCAGCTTCATGAAGGGGTTGACAGAGCTCATGCAACCGAACTTCGAGCTGCTTCTT
GGACCCATCTGCTTACCTCTTGTGGATCGTTTTATTCAACTTTTGAAGGTGGCACAAGCAAGTTCTAGCCAGTACTTCCGGG
AATCTATACTCAATGACATCAGGAAAGCTCGTAATTTATACACTGGTAAAGAATTGGCAGCTGAGTTGGCAAGAATTCGGCA
GCGAGTAGATAATATCGAAGTCTTGACAGCAGATATTGTCATAAATCTGTTACTTTCCTACAGAGATATCCAGGACTATGAT
TCTATTGTGAAGCTGGTAGAGACTTTAGAAAAACTGCCAACCTTTGATTTGGCCTCCCATCACCATGTGAAGTTTCATTATG
CATTTGCACTGAATAGGAGAAATCTCCCTGGTGACAGAGCAAAAGCTCTTGATATTATGATTCCCATGGTGCAAAGCGAAGG
ACAAGTTGCTTCAGATATGTATTGCCTAGTTGGTCGAATCTACAAAGATATGTTTTTGGACTCTAATTTCACGGACACTGAA
AGCAGAGACCATGGAGCTTCTTGGTTCAAAAAGGCATTTGAATCTGAGCCAACACTACAGTCAGGAATTAATTATGCGGTCC
TCCTCCTGGCAGCTGGACACCAGTTTGAATCTTCCTTTGAGCTCCGGAAAGTTGGGGTGAAGCTAAGTAGTCTTCTTGGTAA
AAAGGGAAACTTGGAAAAACTCCAGAGCTACTGGGAAGTTGGATTTTTTCTGGGGGCCAGCGTCCTAGCCAATGACCACATG
AGAGTCATTCAAGCATCTGAAAAGCTTTTTAAACTGAAGACACCAGCATGGTACCTCAAGTCTATTGTAGAGACAATTTTAA
TATATAAGCATTTTGTGAAACTGACCACAGAACAGCCTGTGGCCAAGCAAGAACTTGTGGACTTTTGGATGGATTTCCTGGT
CGAGGCCACAAAGACAGATGTTACTGTGGTTAGGTTTCCAGTATTAATATTAGAACCAACCAAAATCTATCAACCTTCTTAT
TTGTCTATCAACAATGAAGTTGAGGAAAAGACAATCTCTATTTGGCACGTGCTTCCTGATGACAAGAAAGGTATACATGAGT
GGAATTTTAGTGCCTCTTCTGTCAGGGGAGTGAGTATTTCTAAATTTGAAGAAAGATGCTGCTTTCTTTATGTGCTTCACAA
TTCTGATGATTTCCAAATCTATTTCTGTACAGAACTTCATTGTAAAAAGTTTTTTGAGATGGTGAACACCATTACCGAAGAG
AAGGGGAGAAGCACAGAGGAAGGAGACTGTGAAAGTGACTTGCTGGAGTATGACTATGAATATGATGAAAATGGTGACAGAG
TCGTTTTAGGAAAAGGCACTTATGGGATAGTCTACGCAGGTCGGGACTTGAGCAACCAAGTCAGAATTGCTATTAAGGAAAT
CCCAGAGAGAGACAGCAGATACTCTCAGCCCCTGCATGAAGAAATAGCATTGCATAAACACCTGAAGCACAAAAATATTGTC
CAGTATCTGGGCTCTTTCAGTGAGAATGGTTTCATTAAAATCTTCATGGAGCAGGTCCCTGGAGGAAGTCTTTCTGCTCTCC
TTCGTTCCAAATGGGGTCCATTAAAAGACAATGAGCAAACAATTGGCTTTTATACAAAGCAAATACTGGAAGGATTAAAATA
TCTCCATGACAATCAGATAGTTCACCGGGACATAAAGGGTGACAATGTGTTGATTAATACCTACAGTGGTGTTCTCAAGATC
TCTGACTTCGGAACATCAAAGAGGCTTGCTGGCATAAACCCCTGTACTGAAACTTTTACTGGTACCCTCCAGTATATGGCAC
CAGAAATAATAGATAAAGGACCAAGAGGCTACGGAAAAGCAGCAGACATCTGGTCTCTGGGCTGTACAATCATTGAAATGGC
CACAGGAAAACCCCCATTTTATGAACTGGGAGAACCACAAGCAGCTATGTTCAAGGTGGGAATGTTTAAAGTCCACCCTGAG
ATCCCAGAGTCCATGTCTGCAGAGGCCAAGGCATTCATACTGAAATGTTTTGAACCAGATCCTGACAAGAGAGCCTGTGCTA
ACGACTTGCTTGTTGATGAGTTTTTAAAAGTTTCAAGCAAAAAGAAAAAGACACAACCTAAGCTTTCAGCTCTTTCAGCTGG
ATCAAATGAATATCTCAGGAGTATATCCTTGCCGGTACCTGTGCTGGTGGAGGACACCAGCAGCAGCAGTGAGTACGGCTCA
GTTTCACCCGACACGGAGTTGAAAGTGGACCCCTTCTCTTTCAAAACAAGAGCCAAGTCCTGCGGAGAAAGAGATGTCAAGG
GAATTCGGACACTCTTTTTGGGCATTCCAGATGAGAATTTTGAAGATCACAGTGCTCCTCCTTCCCCTGAAGAAAAAGATTC
TGGATTCTTCATGCTGAGGAAGGACAGTGAGAGGCGAGCTACCCTTCACAGGATCCTGACGGAAGACCAAGACAAAATTGTG
AGAAACCTAATGGAATCTTTAGCTCAGGGGGCTGAAGAACCGAAACTAAAATGGGAACACATCACAACCCTCATTGCAAGCC
TCAGAGAATTTGTGAGATCCACTGACCGAAAAATCATAGCCACCACACTGTCAAAGCTGAAACTGGAGCTGGACTTCGACAG
CCATGGCATTAGCCAAGTCCAGGTGGTACTCTTTGGTTTTCAAGATGCTGTCAATAAAGTTCTTCGGAATCATAACATCAAG
CCGCACTGGATGTTTGCCTTAGACAGTATCATTCGGAAGGCGGTACAGACAGCCATTACCATCCTGGTTCCAGAACTAAGGC
CACATTTCAGCCTTGCATCTGAGAGTGATACTGCTGATCAAGAAGACTTGGATGTAGAAGATGACCATGAGGAACAGCCTTC
AAATCAAACTGTCCGAAGACCTCAGGCTGTCATTGAAGATGCTGTGGCTACCTCAGGCGTGAGCACGCTCAGTTCTACTGTG
TCTCATGATTCCCAGAGTGCTCACCGGTCACTGAATGTACAGCTTGGAAGGATGAAAATAGAAACCAATAGATTACTGGAAG
AATTGGTTCGGAAAGAGAAAGAATTACAAGCACTCCTTCATCGAGCTATTGAAGAAAAAGACCAAGAAATTAAACACCTGAA
GCTTAAGTCCCAACCCATAGAAATTCCTGAATTGCCTGTATTTCATCTAAATTCTTCTGGCACAAATACTGAAGATTCTGAA
CTTACCGACTGGCTGAGAGTGAATGGAGCTGATGAAGACACTATAAGCCGGTTTTTGGCTGAAGATTATACACTATTGGATG
TTCTCTACTATGTTACACGTGATGACTTAAAATGCTTGAGACTAAGGGGAGGGATGCTGTGCACACTGTGGAAGGCTATCAT
TGACTTTCGAAACAAACAGACTTGA
Human RIP CDS
(SEQ ID NO: 24)
ATGTGGAGCAAACTGAATAATGAAGAGCACAATGAGCTGAGGGAAGTGGACGGCACCGCTAAGAAGAATGGCGGCACCCTCT
ACTACATGGCGCCCGAGCACCTGAATGACGTCAACGCAAAGCCCACAGAGAAGTCGGATGTGTACAGCTTTGCTGTAGTACT
CTGGGCGATATTTGCAAATAAGGAGCCATATGAAAATGCTATCTGTGAGCAGCAGTTGATAATGTGCATAAAATCTGGGAAC
AGGCCAGATGTGGATGACATCACTGAGTACTGCCCAAGAGAAATTATCAGTCTCATGAAGCTCTGCTGGGAAGCGAATCCGG
AAGCTCGGCCGACATTTCCTGGCATTGAAGAAAAATTTAGGCCTTTTTATTTAAGTCAATTAGAAGAAAGTGTAGAAGAGGA
CGTGAAGAGTTTAAAGAAAGAGTATTCAAACGAAAATGCAGTTGTGAAGAGAATGCAGTCTCTTCAACTTGATTGTGTGGCA
GTACCTTCAAGCCGGTCAAATTCAGCCACAGAACAGCCTGGTTCACTGCACAGTTCCCAGGGACTTGGGATGGGTCCTGTGG
AGGAGTCCTGGTTTGCTCCTTCCCTGGAGCACCCACAAGAAGAGAATGAGCCCAGCCTGCAGAGTAAACTCCAAGACGAAGC
CAACTACCATCTTTATGGCAGCCGCATGGACAGGCAGACGAAACAGCAGCCCAGACAGAATGTGGCTTACAACAGAGAGGAG
GAAAGGAGACGCAGGGTCTCCCATGACCCTTTTGCACAGCAAAGACCTTACGAGAATTTTCAGAATACAGAGGGAAAAGGCA
CTGCTTATTCCAGTGCAGCCAGTCATGGTAATGCAGTGCACCAGCCCTCAGGGCTCACCAGCCAACCTCAAGTACTGTATCA
GAACAATGGATTATATAGCTCACATGGCTTTGGAACAAGACCACTGGATCCAGGAACAGCAGGTCCCAGAGTTTGGTACAGG
CCAATTCCAAGTCATATGCCTAGTCTGCATAATATCCCAGTGCCTGAGACCAACTATCTAGGAAATACACCCACCATGCCAT
TCAGCTCCTTGCCACCAACAGATGAATCTATAAAATATACCATATACAATAGTACTGGCATTCAGATTGGAGCCTACAATTA
TATGGAGATTGGTGGGACGAGTTCATCACTACTAGACAGCACAAATACGAACTTCAAAGAAGAGCCAGCTGCTAAGTACCAA
GCTATCTTTGATAATACCACTAGTCTGACGGATAAACACCTGGACCCAATCAGGGAAAATCTGGGAAAGCACTGGAAAAACT
GTGCCCGTAAACTGGGCTTCACACAGTCTCAGATTGATGAAATTGACCATGACTATGAGCGAGATGGACTGAAAGAAAAGGT
TTACCAGATGCTCCAAAAGTGGGTGATGAGGGAAGGCATAAAGGGAGCCACGGTGGGGAAGCTGGCCCAGGCGCTCCACCAG
TGTTCCAGGATCGACCTTCTGAGCAGCTTGATTTACGTCAGCCAGAACTAA
Human MEKK3 CDS
(SEQ ID NO: 25)
ATGGACGAACAGGAGGCATTGAACTCAATCATGAACGATCTGGTGGCCCTCCAGATGAACCGACGTCACCGGATGCCTGGAT
ATGAGACCATGAAGAACAAAGACACAGGTCACTCAAATAGGCAGAAAAAACACAACAGCAGCAGCTCAGCCCTTCTGAACAG
CCCCACAGTAACAACAAGCTCATGTGCAGGGGCCAGTGAGAAAAAGAAATTTTTGAGTGACGTCAGAATCAAGTTCGAGCAC
AACGGGGAGAGGCGAATTATAGCGTTCAGCCGGCCTGTGAAATATGAAGATGTGGAGCACAAGGTGACAACAGTATTTGGAC
AACCTCTTGATCTACATTACATGAACAATGAGCTCTCCATCCTGCTGAAAAACCAAGATGATCTTGATAAAGCAATTGACAT
TTTAGATAGAAGCTCAAGCATGAAAAGCCTTAGGATATTGCTGTTGTCCCAGGACAGAAACCATAACAGTTCCTCTCCCCAC
TCTGGGGTGTCCAGACAGGTGCGGATCAAGGCTTCCCAGTCCGCAGGGGATATAAATACTATCTACCAGCCCCCCGAGCCCA
GAAGCAGGCACCTCTCTGTCAGCTCCCAGAACCCTGGCCGAAGCTCACCTCCCCCTGGCTATGTTCCTGAGCGGCAGCAGCA
CATTGCCCGGCAGGGGTCCTACACCAGCATCAACAGTGAGGGGGAGTTCATCCCAGAGACCAGCGAGCAGTGCATGCTGGAT
CCCCTGAGCAGTGCAGAAAATTCCTTGTCTGGAAGCTGCCAATCCTTGGACAGGTCAGCAGACAGCCCATCCTTCCGGAAAT
CACGAATGTCCCGTGCCCAGAGCTTCCCTGACAACAGACAGGAATACTCAGATCGGGAAACTCAGCTTTATGACAAAGGGGT
CAAAGGTGGAACCTACCCCCGGCGCTACCACGTGTCTGTGCACCACAAGGACTACAGTGATGGCAGAAGAACATTTCCCCGA
ATACGGCGTCATCAAGGCAACTTGTTCACCCTGGTGCCCTCCAGCCGCTCCCTGAGCACAAATGGCGAGAACATGGGTCTGG
CTGTGCAATACCTGGACCCCCGTGGGCGCCTGCGGAGTGCGGACAGCGAGAATGCCCTCTCTGTGCAGGAGAGGAATGTGCC
AACCAAGTCTCCCAGTGCCCCCATCAACTGGCGCCGGGGAAAGCTCCTGGGCCAGGGTGCCTTCGGCAGGGTCTATTTGTGC
TATGACGTGGACACGGGACGTGAACTTGCTTCCAAGCAGGTCCAATTTGATCCAGACAGTCCTGAGACAAGCAAGGAGGTGA
GTGCTCTGGAGTGCGAGATCCAGTTGCTAAAGAACTTGCAGCATGAGCGCATCGTGCAGTACTATGGCTGTCTGCGGGACCG
CGCTGAGAAGACCCTGACCATCTTCATGGAGTACATGCCAGGGGGCTCGGTGAAAGACCAGTTGAAGGCTTACGGTGCTCTG
ACAGAGAGCGTGACCCGAAAGTACACGCGGCAGATCCTGGAGGGCATGTCCTACCTGCACAGCAACATGATTGTTCACCGGG
ACATTAAGGGAGCCAACATCCTCCGAGACTCTGCTGGGAATGTAAAGCTGGGGGACTTTGGGGCCAGCAAACGCCTGCAGAC
GATCTGTATGTCGGGGACGGGCATGCGCTCCGTCACTGGCACACCCTACTGGATGAGCCCTGAGGTGATCAGCGGCGAGGGC
TATGGAAGGAAAGCAGACGTGTGGAGCCTGGGCTGCACTGTGGTGGAGATGCTGACAGAGAAACCACCGTGGGCAGAGTATG
AAGCTATGGCCGCCATCTTCAAGATTGCCACCCAGCCCACCAATCCTCAGCTGCCCTCCCACATCTCTGAACATGGCCGGGA
CTTCCTGAGGCGCATTTTTGTGGAGGCTCGCCAGAGACCTTCAGCTGAGGAGCTGCTCACACACCACTTTGCACAGCTCATG
TACTGA
Human MEKK6 CDS
(SEQ ID NO: 26)
ATGGCGGGGCCGTGTCCCCGGTCCGGGGCGGAGCGCGCCGGCAGCTGCTGGCAGGACCCGCTGGCCGTGGCGCTGAGCCGGG
GCCGGCAGCTCGCGGCGCCCCCGGGCCGGGGCTGCGCGCGGAGCCGGCCGCTCAGCGTGGTCTACGTGCTGACCCGGGAGCC
GCAGCCCGGGCTCGAGCCTCGGGAGGGAACCGAGGCGGAGCCGCTGCCCCTGCGCTGCCTGCGCGAGGCTTGCGCGCAGGTC
CCCCGGCCGCGGCCGCCCCCGCAGCTGCGCAGCCTGCCCTTCGGGACGCTGGAGCTAGGCGACACCGCGGCTCTGGATGCCT
TCTACAACGCGGATGTGGTGGTGCTGGAGGTGAGCAGCTCGCTGGTACAGCCCTCCCTGTTCTACCACCTTGGTGTGCGTGA
GAGCTTCAGCATGACCAACAATGTGCTCCTCTGCTCCCAGGCCGACCTCCCTGACCTGCAGGCCCTGCGGGAGGATGTTTTC
CAGAAGAACTCGGATTGCGTTGGCAGCTACACACTGATCCCCTATGTGGTGACGGCCACTGGTCGGGTGCTGTGTGGTGATG
CAGGCCTTCTGCGGGGCCTGGCTGATGGGCTGGTACAGGCTGGAGTGGGGACCGAGGCCCTGCTCACTCCCCTGGTGGGCCG
GCTTGCCCGCCTGCTGGAGGCCACACCCACAGACTCTTGTGGCTATTTCCGGGAGACCATTCGGCGGGACATCCGGCAGGCG
CGGGAGCGGTTCAGTGGGCCACAGCTGCGGCAGGAGCTGGCTCGCCTGCAGCGGAGACTGGACAGCGTGGAGCTGCTGAGCC
CCGACATCATCATGAACTTGCTGCTCTCCTACCGCGATGTGCAGGACTACTCGGCCATCATTGAGCTGGTGGAGACGCTGCA
GGCCTTGCCCACCTGTGATGTGGCCGAGCAGCATAATGTCTGCTTCCACTACACTTTTGCCCTCAACCGGAGGAACAGGCCT
GGGGACCGGGCGAAGGCCCTGTCTGTGCTGCTGCCGCTGGTACAGCTTGAGGGCTCTGTGGCGCCCGATCTGTACTGCATGT
GTGGCCGTATCTACAAGGACATGTTCTTCAGCTCGGGTTTCCAGGATGCTGGGCACCGGGAGCAGGCCTATCACTGGTATCG
CAAGGCTTTTGACGTAGAGCCCAGCCTTCACTCAGGCATCAATGCAGCTGTGCTCCTCATTGCTGCCGGGCAGCACTTTGAG
GATTCCAAAGAGCTCCGGCTAATAGGCATGAAGCTGGGCTGCCTGCTGGCCCGCAAAGGCTGCGTGGAGAAGATGCAGTATT
ACTGGGATGTGGGTTTCTACCTGGGAGCCCAGATCCTCGCCAATGACCCCACCCAGGTGGTGCTGGCTGCAGAGCAGCTGTA
TAAGCTCAATGCCCCCATATGGTACCTGGTGTCCGTGATGGAGACCTTCCTGCTCTACCAGCACTTCAGGCCCACGCCAGAG
CCCCCTGGAGGGCCACCACGCCGTGCCCACTTCTGGCTCCACTTCTTGCTACAGTCCTGCCAACCATTCAAGACAGCCTGTG
CCCAGGGCGACCAGTGCTTGGTGCTGGTCCTGGAGATGAACAAGGTGCTGCTGCCTGCAAAGCTCGAGGTTCGGGGTACTGA
CCCAGTAAGCACAGTGACCCTGAGCCTGCTGGAGCCTGAGACCCAGGACATTCCCTCCAGCTGGACCTTCCCAGTCGCCTCC
ATATGCGGAGTCAGCGCCTCAAAGCGCGACGAGCGCTGCTGCTTCCTCTATGCACTCCCCCCGGCTCAGGACGTCCAGCTGT
GCTTCCCCAGCGTAGGGCACTGCCAGTGGTTCTGCGGCCTGATCCAGGCCTGGGTGACGAACCCGGATTCCACGGCGCCCGC
GGAGGAGGCGGAGGGCGCGGGGGAGATGTTGGAGTTTGATTATGAGTACACGGAGACGGGCGAGCGGCTGGTGCTGGGCAAG
GGCACGTATGGGGTGGTGTACGCGGGCCGCGATCGCCACACGAGGGTGCGCATCGCCATCAAGGAGATCCCGGAGCGGGACA
GCAGGTTCTCTCAGCCCCTGCATGAAGAGATCGCTCTTCACAGACGCCTGCGCCACAAGAACATAGTGCGCTATCTGGGCTC
AGCTAGCCAGGGCGGCTACCTTAAGATCTTCATGGAGGAAGTGCCTGGAGGCAGCCTGTCCTCCTTGCTGCGGTCGGTGTGG
GGACCCCTGAAGGACAACGAGAGCACCATCAGTTTCTACACCCGCCAGATCCTGCAGGGACTTGGCTACTTGCACGACAACC
ACATCGTGCACAGGGACATAAAAGGGGACAATGTGCTGATCAACACCTTCAGTGGGCTGCTCAAGATTTCTGACTTCGGCAC
CTCCAAGCGGCTGGCAGGCATCACACCTTGCACTGAGACCTTCACAGGAACTCTGCAGTATATGGCCCCAGAAATCATTGAC
CAGGGCCCACGCGGGTATGGGAAAGCAGCTGACATCTGGTCACTGGGCTGCACTGTCATTGAGATGGCCACAGGTCGCCCCC
CCTTCCACGAGCTCGGGAGCCCACAGGCTGCCATGTTTCAGGTGGGTATGTACAAGGTCCATCCGCCAATGCCCAGCTCTCT
GTCGGCCGAGGCCCAAGCCTTTCTCCTCCGAACTTTTGAGCCAGACCCCCGCCTCCGAGCCAGCGCCCAGACACTGCTGGGG
GACCCCTTCCTGCAGCCTGGGAAAAGGAGCCGCAGCCCCAGCTCCCCACGACATGCTCCACGGCCCTCAGATGCCCCTTCTG
CCAGTCCCACTCCTTCAGCCAACTCAACCACCCAGTCTCAGACATTCCCGTGCCCTCAGGCACCCTCTCAGCACCCACCCAG
CCCCCCGAAGCGCTGCCTCAGTTATGGGGGCACCAGCCAGCTCCGGGTGCCCGAGGAGCCTGCGGCCGAGGAGCCTGCGTCT
CCGGAGGAGAGTTCGGGGCTGAGCCTGCTGCACCAGGAGAGCAAGCGTCGGGCCATGCTGGCCGCAGTATTGGAGCAGGAGC
TGCCAGCGCTGGCGGAGAATCTGCACCAGGAGCAGAAGCAAGAGCAGGGGGCCCGTCTGGGCAGAAACCATGTGGAAGAGCT
GCTGCGCTGCCTCGGGGCACACATCCACACTCCCAACCGCCGGCAGCTCGCCCAGGAGCTGCGGGCGCTGCAAGGACGGCTG
AGGGCCCAGGGCCTTGGGCCTGCGCTTCTGCACAGACCGCTGTTTGCCTTCCCGGATGCGGTGAAGCAGATCCTCCGCAAGC
GCCAGATCCGTCCACACTGGATGTTCGTTCTGGACTCACTGCTCAGCCGTGCTGTGCGGGCAGCCCTGGGTGTGCTAGGACC
GGAGGTGGAGAAGGAGGCGGTCTCACCGAGGTCAGAGGAGCTGAGTAATGAAGGGGACTCCCAGCAGAGCCCAGGCCAGCAG
AGCCCGCTTCCGGTGGAGCCCGAGCAGGGCCCCGCTCCTCTGATGGTGCAGCTGAGCCTCTTGAGGGCAGAGACTGATCGGC
TGCGCGAAATCCTGGCGGGGAAGGAACGGGAGTACCAGGCCCTGGTGCAGCGGGCTCTACAGCGGCTGAATGAGGAAGCCCG
GACCTATGTCCTGGCCCCAGAGCCTCCAACTGCTCTTTCAACGGACCAGGGCCTGGTGCAGTGGCTACAGGAACTGAATGTG
GATTCAGGCACCATCCAAATGCTGTTGAACCATAGCTTCACCCTCCACACTCTGCTCACCTATGCCACTCGAGATGACCTCA
TCTACACCCGCATCAGGGGAGGGATGGTATGCCGCATCTGGAGGGCCATCTTGGCACAGCGAGCAGGATCCACACCAGTCAC
CTCTGGACCCTGA
Human NIK CDS
(SEQ ID NO: 27)
ATGGCAGTGATGGAAATGGCCTGCCCAGGTGCCCCTGGCTCAGCAGTGGGGCAGCAGAAGGAACTCCCCAAAGCCAAGGAGA
AGACGCCGCCACTGGGGAAGAAACAGAGCTCCGTCTACAAGCTTGAGGCCGTGGAGAAGAGCCCTGTGTTCTGCGGAAAGTG
GGAGATCCTGAATGACGTGATTACCAAGGGCACAGCCAAGGAAGGCTCCGAGGCAGGGCCAGCTGCCATCTCTATCATCGCC
CAGGCTGAGTGTGAGAATAGCCAAGAGTTCAGCCCCACCTTTTCAGAACGCATTTTCATCGCTGGGTCCAAACAGTACAGCC
AGTCCGAGAGTCTTGATCAGATCCCCAACAATGTGGCCCATGCTACAGAGGGCAAAATGGCCCGTGTGTGTTGGAAGGGAAA
GCGTCGCAGCAAAGCCCGGAAGAAACGGAAGAAGAAGAGCTCAAAGTCCCTGGCTCATGCAGGAGTGGCCTTGGCCAAACCC
CTCCCCAGGACCCCTGAGCAGGAGAGCTGCACCATCCCAGTGCAGGAGGATGAGTCTCCACTCGGCGCCCCATATGTTAGAA
ACACCCCGCAGTTCACCAAGCCTCTGAAGGAACCAGGCCTTGGGCAACTCTGTTTTAAGCAGCTTGGCGAGGGCCTACGGCC
GGCTCTGCCTCGATCAGAACTCCACAAACTGATCAGCCCCTTGCAATGTCTGAACCACGTGTGGAAACTGCACCACCCCCAG
GACGGAGGCCCCCTGCCCCTGCCCACGCACCCCTTCCCCTATAGCAGACTGCCTCATCCCTTCCCATTCCACCCTCTCCAGC
CCTGGAAACCTCACCCTCTGGAGTCCTTCCTGGGCAAACTGGCCTGTGTAGACAGCCAGAAACCCTTGCCTGACCCACACCT
GAGCAAACTGGCCTGTGTAGACAGTCCAAAGCCCCTGCCTGGCCCACACCTGGAGCCCAGCTGCCTGTCTCGTGGTGCCCAT
GAGAAGTTTTCTGTGGAGGAATACCTAGTGCATGCTCTGCAAGGCAGCGTGAGCTCAGGCCAGGCCCACAGCCTGACCAGCC
TGGCCAAGACCTGGGCAGCAAGGGGCTCCAGATCCCGGGAGCCCAGCCCCAAAACTGAGGACAACGAGGGTGTCCTGCTCAC
TGAGAAACTCAAGCCAGTGGATTATGAGTACCGAGAAGAAGTCCACTGGGCCACGCACCAGCTCCGCCTGGGCAGAGGCTCC
TTCGGAGAGGTGCACAGGATGGAGGACAAGCAGACTGGCTTCCAGTGCGCTGTCAAAAAGGTGCGGCTGGAAGTATTTCGGG
CAGAGGAGCTGATGGCATGTGCAGGATTGACCTCACCCAGAATTGTCCCTTTGTATGGAGCTGTGAGAGAAGGGCCTTGGGT
CAACATCTTCATGGAGCTGCTGGAAGGTGGCTCCCTGGGCCAGCTGGTCAAGGAGCAGGGCTGTCTCCCAGAGGACCGGGCC
CTGTACTACCTGGGCCAGGCCCTGGAGGGTCTGGAATACCTCCACTCACGAAGGATTCTGCATGGGGACGTCAAAGCTGACA
ACGTGCTCCTGTCCAGCGATGGGAGCCACGCAGCCCTCTGTGACTTTGGCCATGCTGTGTGTCTTCAACCTGATGGCCTGGG
AAAGTCCTTGCTCACAGGGGACTACATCCCTGGCACAGAGACCCACATGGCTCCGGAGGTGGTGCTGGGCAGGAGCTGCGAC
GCCAAGGTGGATGTCTGGAGCAGCTGCTGTATGATGCTGCACATGCTCAACGGCTGCCACCCCTGGACTCAGTTCTTCCGAG
GGCCGCTCTGCCTCAAGATTGCCAGCGAGCCTCCGCCTGTGAGGGAGATCCCACCCTCCTGCGCCCCTCTCACAGCCCAGGC
CATCCAAGAGGGGCTGAGGAAAGAGCCCATCCACCGCGTGTCTGCAGCGGAGCTGGGAGGGAAGGTGAACCGGGCACTACAG
CAAGTGGGAGGTCTGAAGAGCCCTTGGAGGGGAGAATATAAAGAACCAAGACATCCACCGCCAAATCAAGCCAATTACCACC
AGACCCTCCATGCCCAGCCGAGAGAGCTTTCGCCAAGGGCCCCAGGGCCCCGGCCAGCTGAGGAGACAACAGGCAGAGCCCC
TAAGCTCCAGCCTCCTCTCCCACCAGAGCCCCCAGAGCCAAACAAGTCTCCTCCCTTGACTTTGAGCAAGGAGGAGTCTGGG
ATGTGGGAACCCTTACCTCTGTCCTCCCTGGAGCCAGCCCCTGCCAGAAACCCCAGCTCACCAGAGCGGAAAGCAACCGTCC
CGGAGCAGGAACTGCAGCAGCTGGAAAJAGAATTATTCCTCAACAGCCTGTCCCAGCCATTTTCTCTGGAGGAGCAGGAGCA
AATTCTCTCGTGCCTCAGCATCGACAGCCTCTCCCTGTCGGATGACAGTGAGAAGAACCCATCAAAGGCCTCTCAAAGCTCG
CGGGACACCCTGAGCTCAGGCGTACACTCCTGGAGCAGCCAGGCCGAGGCTCGAAGCTCCAGCTGGAACATGGTGCTGGCCC
GGGGGCGGCCCACCGACACCCCAAGCTATTTCAATGGTGTGAAAGTCCAAATACAGTCTCTTAATGGTGAACACCTGCACAT
CCGGGAGTTCCACCGGGTCAAAGTGGGAGACATCGCCACTGGCATCAGCAGCCAGATCCCAGCTGCAGCCTTCAGCTTGGTC
ACCAAAGACGGGCAGCCTGTTCGCTACGACATGGAGGTGCCAGACTCGGGCATCGACCTGCAGTGCACACTGGCCCCTGATG
GCAGCTTCGCCTGGAGCTGGAGGGTCAAGCATGGCCAGCTGGAGAACAGGCCCTAA
Human IKK CDS
(SEQ ID NO: 28)
ATGTTTTCAGGGGGGTGTCATAGCCCCGGGTTTGGCCGCCCCAGCCCCGCCTTCCCCGCCCCGGGGAGCCCGCCCCCTGCCC
CGCGTCCCTGCCGACAGGAAACAGGTGAGCAGATTGCCATCAAGCAGTGCCGGCAGGAGCTCAGCCCCCGGAACCGAGAGCG
GTGGTGCCTGGAGATCCAGATCATGAGAAGGCTGACCCACCCCAATGTGGTGGCTGCCCGAGATGTCCCTGAGGGGATGCAG
AACTTGGCGCCCAATGACCTGCCCCTGCTGGCCATGGAGTACTGCCAAGGAGGAGATCTCCGGAAGTACCTGAACCAGTTTG
AGAACTGCTGTGGTCTGCGGGAAGGTGCCATCCTCACCTTGCTGAGTGACATTGCCTCTGCGCTTAGATACCTTCATGAAAA
CAGAATCATCCATCGGGATCTAAAGCCAGAAAACATCGTCCTGCAGCAAGGAGAACAGAGGTTAATACACAAAATTATTGAC
CTAGGATATGCCAAGGAGCTGGATCAGGGCAGTCTTTGCACATCATTCGTGGGGACCCTGCAGTACCTGGCCCCAGAGCTAC
TGGAGCAGCAGAAGTACACAGTGACCGTCGACTACTGGAGCTTCGGCACCCTGGCCTTTGAGTGCATCACGGGCTTCCGGCC
CTTCCTCCCCAACTGGCAGCCCGTGCAGTGGCATTCAAAAGTGCGGCAGAAGAGTGAGGTGGACATTGTTGTTAGCGAAGAC
TTGAATGGAACGGTGAAGTTTTCAAGCTCTTTACCCTACCCCAATAATCTTAACAGTGTCCTGGCTGAGCGACTGGAGAAGT
GGCTGCAACTGATGCTGATGTGGCACCCCCGACAGAGGGGCACGGATCCCACGTATGGGCCCAATGGCTGCTTCAAGGCCCT
GGATGACATCTTAAACTTAAAGCTGGTTCATATCTTGAACATGGTCACGGGCACCATCCACACCTACCCTGTGACAGAGGAT
GAGAGTCTGCAGAGCTTGAAGGCCAGAATCCAACAGGACACGGGCATCCCAGAGGAGGACCAGGAGCTGCTGCAGGAAGCGG
GCCTGGCGTTGATCCCCGATAAGCCTGCCACTCAGTGTATTTCAGACGGCAAGTTAAATGAGGGCCACACATTGGACATGGA
TCTTGTTTTTCTCTTTGACAACAGTAAAATCACCTATGAGACTCAGATCTCCCCACGGCCCCAACCTGAAAGTGTCAGCTGT
ATCCTTCAAGAGCCCAAGAGGAATCTCGCCTTCTTCCAGCTGAGGAAGGTGTGGGGCCAGGTCTGGCACAGCATCCAGACCC
TGAAGGAAGATTGCAACCGGCTGCAGCAGGGACAGCGAGCCGCCATGATGAATCTCCTCCGAAACAACAGCTGCCTCTCCAA
AATGAAGAATTCCATGGCTTCCATGTCTCAGCAGCTCAAGGCCAAGTTGGATTTCTTCAAAACCAGCATCCAGATTGACCTG
GAGAAGTACAGCGAGCAAACCGAGTTTGGGATCACATCAGATAAACTGCTGCTGGCCTGGAGGGAAATGGAGCAGGCTGTGG
AGCTCTGTGGGCGGGAGAACGAAGTGAAACTCCTGGTAGAACGGATGATGGCTCTGCAGACCGACATTGTGGACTTACAGAG
GAGCCCCATGGGCCGGAAGCAGGGGGGAACGCTGGACGACCTAGAGGAGCAAGCAAGGGAGCTGTACAGGAGACTAAGGGAA
AAACCTCGAGACCAGCGAACTGAGGGTGACAGTCAGGAAATGGTACGGCTGCTGCTTCAGGCAATTCAGAGCTTCGAGAAGA
AAGTGCGAGTGATCTATACGCAGCTCAGTAAAACTGTGGTTTGCAAGCAGAAGGCGCTGGAACTGTTGCCCAAGGTGGAAGA
GGTGGTGAGCTTAATGAATGAGGATGAGAAGACTGTTGTCCGGCTGCAGGAGAAGCGGCAGAAGGAGCTCTGGAATCTCCTG
AAGATTGCTTGTAGCAAGGTCCGTGGTCCTGTCAGTGGAAGCCCGGATAGCATGAATGCCTCTCGACTTAGCCAGCCTGGGC
AGCTGATGTCTCAGCCCTCCACGGCCTCCAACAGCTTACCTGAGCCAGCCAAGAAGAGTGAAGAACTGGTGGCTGAAGCACA
TAACCTCTGCACCCTGCTAGAAAATGCCATACAGGACACTGTGAGGGAACAAGACCAGAGTTTCACGGCCCTAGACTGGAGC
TGGTTACAGACGGAAGAAGAAGAGCACAGCTGCCTGGAGCAGGCCTCATGA
Human NF-κB CDS
(SEQ ID NO: 29)
ATGGCAGAAGATGATCCATATTTGGGAAGGCCTGAACAAATGTTTCATTTGGATCCTTCTTTGACTCATACAATATTTAATC
CAGAAGTATTTCAACCACAGATGGCACTGCCAACAGATGGCCCATACCTTCAAATATTAGAGCAACCTAAACAGAGAGGATT
TCGTTTCCGTTATGTATGTGAAGGCCCATCCCATGGTGGACTACCTGGTGCCTCTAGTGAAAAGAACAAGAAGTCTTACCCT
CAGGTCAAAATCTGCAACTATGTGGGACCAGCAAAGGTTATTGTTCAGTTGGTCACAAATGGAAAAAATATCCACCTGCATG
CCCACAGCCTGGTGGGAAAACACTGTGAGGATGGGATCTGCACTGTAACTGCTGGACCCAAGGACATGGTGGTCGGCTTCGC
AAACCTGGGTATACTTCATGTGACAAAGAAAAAAGTATTTGAAACACTGGAAGCACGAATGACAGAGGCGTGTATAAGGGGC
TATAATCCTGGACTCTTGGTGCACCCTGACCTTGCCTATTTGCAAGCAGAAGGTGGAGGGGACCGGCAGCTGGGAGATCGGG
AAAAAGAGCTAATCCGCCAAGCAGCTCTGCAGCAGACCAAGGAGATGGACCTCAGCGTGGTGCGGCTCATGTTTACAGCTTT
TCTTCCGGATAGCACTGGCAGCTTCACAAGGCGCCTGGAACCCGTGGTATCAGACGCCATCTATGACAGTAAAGCCCCCAAT
GCATCCAACTTGAAAATTGTAAGAATGGACAGGACAGCTGGATGTGTGACTGGAGGGGAGGAAATTTATCTTCTTTGTGACA
AAGTTCAGAAAGATGACATCCAGATTCGATTTTATGAAGAGGAAGAAAATGGTGGAGTCTGGGAAGGATTTGGAGATTTTTC
CCCCACAGATGTTCATAGACAATTTGCCATTGTCTTCAAAACTCCAAAGTATAAAGATATTAATATTACAAAACCAGCCTCT
GTGTTTGTCCAGCTTCGGAGGAAATCTGACTTGGAAACTAGTGAACCAAAACCTTTCCTCTACTATCCTGAAATCAAAGATA
AAGAAGAAGTGCAGAGGAAACGTCAGAAGCTCATGCCCAATTTTTCGGATAGTTTCGGCGGTGGTAGTGGTGCTGGAGCTGG
AGGCGGAGGCATGTTTGGTAGTGGCGGTGGAGGAGGGGGCACTGGAAGTACAGGTCCAGGGTATAGCTTCCCACACTATGGA
TTTCCTACTTATGGTGGGATTACTTTCCATCCTGGAACTACTAAATCTAATGCTGGGATGAAGCATGGAACCATGGACACTG
AATCTAAAAAGGACCCTGAAGGTTGTGACAAAAGTGATGACAAAAACACTGTAAACCTCTTTGGGAAAGTTATTGAAACCAC
AGAGCAAGATCAGGAGCCCAGCGAGGCCACCGTTGGGAATGGTGAGGTCACTCTAACGTATGCAACAGGAACAAAAGAAGAG
AGTGCTGGAGTTCAGGATAACCTCTTTCTAGAGAAGGCTATGCAGCTTGCAAAGAGGCATGCCAATGCCCTTTTCGACTACG
CGGTGACAGGAGACGTGAAGATGCTGCTGGCCGTCCAGCGCCATCTCACTGCTGTGCAGGATGAGAATGGGGACAGTGTCTT
ACACTTAGCAATCATCCACCTTCATTCTCAACTTGTGAGGGATCTACTAGAAGTCACATCTGGTTTGATTTCTGATGACATT
ATCAACATGAGAAATGATCTGTACCAGACGCCCTTGCACTTGGCAGTGATCACTAAGCAGGAAGATGTGGTGGAGGATTTGC
TGAGGGCTGGGGCCGACCTGAGCCTTCTGGACCGCTTGGGTAACTCTGTTTTGCACCTAGCTGCCAAAGAAGGACATGATAA
AGTTCTCAGTATCTTACTCAAGCACAAAAAGGCAGCACTACTTCTTGACCACCCCAACGGGGACGGTCTGAATGCCATTCAT
CTAGCCATGATGAGCAATAGCCTGCCATGTTTGCTGCTGCTGGTGGCCGCTGGGGCTGACGTCAATGCTCAGGAGCAGAAGT
CCGGGCGCACAGCACTGCACCTGGCTGTGGAGCACGACAACATCTCATTGGCAGGCTGCCTGCTCCTGGAGGGTGATGCCCA
TGTGGACAGTACTACCTACGATGGAACCACACCCCTGCATATAGCAGCTGGGAGAGGGTCCACCAGGCTGGCAGCTCTTCTC
AAAGCAGCAGGAGCAGATCCCCTGGTGGAGAACTTTGAGCCTCTCTATGACCTGGATGACTCTTGGGAAAATGCAGGAGAGG
ATGAAGGAGTTGTGCCTGGAACCACGCCTCTAGATATGGCCACCAGCTGGCAGGTATTTGACATATTAAATGGGAAACCATA
TGAGCCAGAGTTTACATCTGATGATTTACTAGCACAAGGAGACATGAAACAGCTGGCTGAAGATGTGAAGCTGCAGCTGTAT
AAGTTACTAGAAATTCCTGATCCAGACAAAAACTGGGCTACTCTGGCGCAGAAATTAGGTCTGGGGATACTTAATAATGCCT
TCCGGCTGAGTCCTGCTCCTTCCAAAACACTTATGGACAACTATGAGGTCTCTGGGGGTACAGTCAGAGAGCTGGTGGAGGC
CCTGAGACAAATGGGCTACACCGAAGCAATTGAAGTGATCCAGGCAGCCTCCAGCCCAGTGAAGACCACCTCTCAGGCCCAC
TCGCTGCCTCTCTCGCCTGCCTCCACAAGGCAGCAAATAGACGAGCTCCGAGACAGTGACAGTGTCTGCGACAGCGGCGTGG
AGACATCCTTCCGCAAACTCAGCTTTACCGAGTCTCTGACCAGTGGTGCCTCACTGCTAACTCTCAACAAAATGCCCCATGA
TTATGGGCAGGAAGGACCTCTAGAAGGCAAAATTTAG
Human CD14 CDS
(SEQ ID NO: 30)
ATGGAGCGCGCGTCCTGCTTGTTGCTGCTGCTGCTGCCGCTGGTGCACGTCTCTGCGACCACGCCAGAACCTTGTGAGCTGG
ACGATGAAGATTTCCGCTGCGTCTGCAACTTCTCCGAACCTCAGCCCGACTGGTCCGAAGCCTTCCAGTGTGTGTCTGCAGT
AGAGGTGGAGATCCATGCCGGCGGTCTCAACCTAGAGCCGTTTCTAAAGCGCGTCGATGCGGACGCCGACCCGCGGCAGTAT
GCTGACACGGTCAAGGCTCTCCGCGTGCGGCGGCTCACAGTGGGAGCCGCACAGGTTCCTGCTCAGCTACTGGTAGGCGCCC
TGCGTGTGCTAGCGTACTCCCGCCTCAAGGAACTGACGCTCGAGGACCTAAAGATAACCGGCACCATGCCTCCGCTGCCTCT
GGAAGCCACAGGACTTGCACTTTCCAGCTTGCGCCTACGCAACGTGTCGTGGGCGACAGGGCGTTCTTGGCTCGCCGAGCTG
CAGCAGTGGCTCAAGCCAGGCCTCAAGGTACTGAGCATTGCCCAAGCACACTCGCCTGCCTTTTCCTGCGAACAGGTTCGCG
CCTTCCCGGCCCTTACCAGCCTAGACCTGTCTGACAATCCTGGACTGGGCGAACGCGGACTGATGGCGGCTCTCTGTCCCCA
CAAGTTCCCGGCCATCCAGAATCTAGCGCTGCGCAACACAGGAATGGAGACGCCCACAGGCGTGTGCGCCGCACTGGCGGCG
GCAGGTGTGCAGCCCCACAGCCTAGACCTCAGCCACAACTCGCTGCGCGCCACCGTAAACCCTAGCGCTCCGAGATGCATGT
GGTCCAGCGCCCTGAACTCCCTCAATCTGTCGTTCGCTGGGCTGGAACAGGTGCCTAAAGGACTGCCAGCCAAGCTCAGAGT
GCTCGATCTCAGCTGCAACAGACTGAACAGGGCGCCGCAGCCTGACGAGCTGCCCGAGGTGGATAACCTGACACTGGACGGG
AATCCCTTCCTGGTCCCTGGAACTGCCCTCCCCCACGAGGGCTCAATGAACTCCGGCGTGGTCCCAGCCTGTGCACGTTCGA
CCCTGTCGGTGGGGGTGTCGGGAACCCTGGTGCTGCTCCAAGGGGCCCGGGGCTTTGCCTAA
Human MyD88 CDS
(SEQ ID NO: 31)
ATGCGACCCGACCGCGCTGAGGCTCCAGGACCGCCCGCCATGGCTGCAGGAGGTCCCGGCGCGGGGTCTGCGGCCCCGGTCT
CCTCCACATCCTCCCTTCCCCTGGCTGCTCTCAACATGCGAGTGCGGCGCCGCCTGTCTCTGTTCTTGAACGTGCGGACACA
GGTGGCGGCCGACTGGACCGCGCTGGCGGAGGAGATGGACTTTGAGTACTTGGAGATCCGGCAACTGGAGACACAAGCGGAC
CCCACTGGCAGGCTGCTGGACGCCTGGCAGGGACGCCCTGGCGCCTCTGTAGGCCGACTGCTCGAGCTGCTTACCAAGCTGG
GCCGCGACGACGTGCTGCTGGAGCTGGGACCCAGCATTGGTGCCGCCGGATGGTGGTGGTTGTCTCTGATGATTACCTGCAG
AGCAAGGAATGTGACTTCCAGACCAAATTTGCACTCAGCCTCTCTCCAGGTGCCCATCAGAAGCGACTGA
Human IRAK CDS
(SEQ ID NO: 32)
ATGGCCGGGGGGCCGGGCCCGGGGGAGCCCGCAGCCCCCGGCGCCCAGCACTTCTTGTACGAGGTGCCGCCCTGGGTCATGT
GCCGCTTCTACAAAGTGATGGACGCCCTGGAGCCCGCCGACTGGTGCCAGTTCGCCGCCCTGATCGTGCGCGACCAGACCGA
GCTGCGGCTGTGCGAGCGCTCCGGGCAGCGCACGGCCAGCGTCCTGTGGCCCTGGATCAACCGCAACGCCCGTGTGGCCGAC
CTCGTGCACATCCTCACGCACCTGCAGCTGCTCCGTGCGCGGGACATCATCACAGCCTGGCACCCTCCCGCCCCGCTTCCGT
CCCCAGGCACCACTGCCCCGAGGCCCAGCAGCATCCCTGCACCCGCCGAGGCCGAGGCCTGGAGCCCCCGGAAGTTGCCATC
CTCAGCCTCCACCTTCCTCTCCCCAGCTTTTCCAGGCTCCCAGACCCATTCAGGGCCTGAGCTCGGCCTGGTCCCAAGCCCT
GCTTCCCTGTGGCCTCCACCGCCATCTCCAGCCCCTTCTTCTACCAAGCCAGGCCCAGAGAGCTCAGTGTCCCTCCTGCAGG
GAGCCCGCCCCTTTCCGTTTTGCTGGCCCCTCTGTGAGATTTCCCGGGGCACCCACAACTTCTCGGAGGAGCTCAAGATCGG
GGAGGGTGGCTTTGGGTGCGTGTACCGGGCGGTGATGAGGAACACGGTGTATGCTGTGAAGAGGCTGAAGGAGAACGCTGAC
CTGGAGTGGACTGCAGTGAAGCAGAGCTTCCTGACCGAGGTGGAGCAGCTGTCCAGGTTTCGTCACCCAAACATTGTGGACT
TTGCTGGCTACTGTGCTCAGAACGGCTTCTACTGCCTGGTGTACGGCTTCCTGCCCAACGGCTCCCTGGAGGACCGTCTCCA
CTGCCAGACCCAGGCCTGCCCACCTCTCTCCTGGCCTCAGCGACTGGACATCCTTCTGGGTACAGCCCGGGCAATTCAGTTT
CTACATCAGGACAGCCCCAGCCTCATCCATGGAGACATCAAGAGTTCCAACGTCCTTCTGGATGAGAGGCTGACACCCAAGC
TGGGAGACTTTGGCCTGGCCCGGTTCAGCCGCTTTGCCGGGTCCAGCCCCAGCCAGAGCAGCATGGTGGCCCGGACACAGAC
AGTGCGGGGCACCCTGGCCTACCTGCCCGAGGAGTACATCAAGACGGGAAGGCTGGCTGTGGACACGGACACCTTCAGCTTT
GGGGTGGTAGTGCTAGAGACCTTGGCTGGTCAGAGGGCTGTGAAGACGCACGGTGCCAGGACCAAGTATCTGAAAGACCTGG
TGGAAGAGGAGGCTGAGGAGGCTGGAGTGGCTTTGAGAAGCACCCAGAGCACACTGCAAGCAGGTCTGGCTGCAGATGCCTG
GGCTGCTCCCATCGCCATGCAGATCTACAAGAAGCACCTGGACCCCAGGCCCGGGCCCTGCCCACCTGAGCTGGGCCTGGGC
CTGGGCCAGCTGGCCTGCTGCTGCCTGCACCGCCGGGCCAAAAGGAGGCCTCCTATGACCCAGGAGAACTCCTACGTGTCCA
GCACTGGCAGAGCCCACAGTGGGGCTGCTCCATGGCAGCCCCTGGCAGCGCCATCAGGAGCCAGTGCCCAGGCAGCAGAGCA
GCTGCAGAGAGGCCCCAACCAGCCCGTGGAGAGTGACGAGAGCCTAGGCGGCCTCTCTGCTGCCCTGCGCTCCTGGCACTTG
ACTCCAAGCTGCCCTCTGGACCCAGCACCCCTCAGGGAGGCCGGCTGTCCTCAGGGGGACACGGCAGGAGAATCGAGCTGGG
GGAGTGGCCCAGGATCCCGGCCCACAGCCGTGGAAGGACTGGCCCTTGGCAGCTCTGCATCATCGTCGTCAGAGCCACCGCA
GATTATCATCAACCCTGCCCGACAGAAGATGGTCCAGAAGCTGGCCCTGTACGAGGATGGGGCCCTGGACAGCCTGCAGCTG
CTGTCGTCCAGCTCCCTCCCAGGCTTGGGCCTGGAACAGGACAGGCAGGGGCCCGAAGAAAGTGATGAATTTCAGAGCTGA
Human LBP CDS
(SEQ ID NO: 33)
ATGGGGGCCTTGGCCAGAGCCCTGCCGTCCATACTGCTGGCATTGCTGCTTACGTCCACCCCAGAGGCTCTGGGTGCCAACC
CCGGCTTGGTCGCCAGGATCACCGACAAGGGACTGCAGTATGCGGCCCAGGAGGGGCTATTAGCTCTGCAGAGTGAGCTGCT
CAGGATCACGCTGCCTGACTTCACCGGGGACTTGAGGATCCCCCACGTCGGCCGTGGGCGCTATGAGTTCCACAGCCTGAAC
ATCCACAGCTGTGAGCTGCTTCACTCTGCGCTGAGGCCTGTCCCTGGCCAGGGCCTGAGTCTCAGCATCTCCGACTCCTCCA
TCCGGGTCCAGGGCAGGTGGAAGGTGCGCAAGTCATTCTTCAAACTACAGGGCTCCTTTGATGTCAGTGTCAAGGGCATCAG
CATTTCGGTCAACCTCCTGTTGGGCAGCGAGTCCTCCGGGAGGCCCACAGTTACTGCCTCCAGCTGCAGCAGTGACATCGCT
GACGTGGAGGTGGACATGTCGGGAGACTTGGGGTGGCTGTTGAACCTCTTCCACAACCAGATTGAGTCCAAGTTCCAGAAAG
TACTGGAGAGCAGGATTTGCGAAATGATCCAGAAATCAGTGTCCTCCGATCTACAGCCTTATCTCCAAACTCTGCCAGTTAC
AACAGAGATTGACAGTTTCGCCGACATTGATTATAGCTTAGTGGAAGCCCCTCGGGCAACAGCCCAGATGCTGGAGGTGATG
TTTAAGGGTGAAATCTTTCATCGTAACCACCGTTCTCCAGTTACCCTCCTTGCTGCAGTCATGAGCCTTCCTGAGGAACACA
ACAAAATGGTCTACTTTGCCATCTCGGATTATGTCTTCAACACGGCCAGCCTGGTTTATCATGAGGAAGGATATCTGAACTT
CTCCATCACAGATGACATGATACCGCCTGACTCTAATATCCGACTGACCACCAAGTCCTTCCGACCCTTCGTCCCACGGTTA
GCCAGGCTCTACCCCAACATGAACCTGGAACTCCAGGGATCAGTGCCCTCTGCTCCGCTCCTGAACTTCAGCCCTGGGAATC
TGTCTGTGGACCCCTATATGGAGATAGATGCCTTTGTGCTCCTGCCCAGCTCCAGCAAGGAGCCTGTCTTCCGGCTCAGTGT
GGCCACTAATGTGTCCGCCACCTTGACCTTCAATACCAGCAAGATCACTGGGTTCCTGAAGCCAGGAAAGGTAAAAGTGGAA
CTGAAAGAATCCAAAGTTGGACTATTCAATGCAGAGCTGTTGGAAGCGCTCCTCAACTATTACATCCTTAACACCTTCTACC
CCAAGTTCAATGATAAGTTGGCCGAAGGCTTCCCCCTTCCTCTGCTGAAGCGTGTTCAGCTCTACGACCTTGGGCTGCAGAT
CCATAAGGACTTCCTGTTCTTGGGTGCCAATGTCCAATACATGAGAGTTTGA
Human TRAF6 CDS
(SEQ ID NO: 34)
ATGAGTCTGCTAAACTGTGAAAACAGCTGTGGATCCAGCCAGTCTGAAAGTGACTGCTGTGTGGCCATGGCCAGCTCCTGTA
GCGCTGTAACAAAAGATGATAGTGTGGGTGGAACTGCCAGCACGGGGAACCTCTCCAGCTCATTTATGGAGGAGATCCAGGG
ATATGATGTAGAGTTTGACCCACCCCTGGAAAGCAAGTATGAATGCCCCATCTGCTTGATGGCATTACGAGAAGCAGTGCAA
ACGCCATGCGGCCATAGGTTCTGCAAAGCCTGCATCATAAAATCAATAAGGGATGCAGGTCACAAATGTCCAGTTGACAATG
AAATACTGCTGGAAAATCAACTATTTCCAGACAATTTTGCAAAACGTGAGATTCTTTCTCTGATGGTGAAATGTCCAAATGA
AGGTTGTTTGCACAAGATGGAACTGAGACATCTTGAGGATCATCAAGCACATTGTGAGTTTGCTCTTATGGATTGTCCCCAA
TGCCAGCGTCCCTTCCAAAAATTCCATATTAATATTCACATTCTGAAGGATTGTCCAAGGAGACAGGTTTCTTGTGACAACT
GTGCTGCATCAATGGCATTTGAAGATAAAGAGATCCATGACCAGAACTGTCCTTTGGCAAATGTCATCTGTGAATACTGCAA
TACTATACTCATCAGAGAACAGATGCCTAATCATTATGATCTAGACTGCCCTACAGCCCCAATTCCATGCACATTCAGTACT
TTTGGTTGCCATGAAAAGATGCAGAGGAATCACTTGGCACGCCACCTACAAGAGAACACCCAGTCACACATGAGAATGTTGG
CCCAGGCTGTTCATAGTTTGAGCGTTATACCCGACTCTGGGTATATCTCAGAGGTCCGGAATTTCCAGGAAACTATTCACCA
GTTAGAGGGTCGCCTTGTAAGACAAGACCATCAAATCCGGGAGCTGACTGCTAAAATGGAAACTCAGAGTATGTATGTAAGT
GAGCTCAAACGAACCATTCGAACCCTTGAGGACAAAGTTGCTGAAATCGAAGCACAGCAGTGCAATGGAATTTATATTTGGA
AGATTGGCAACTTTGGAATGCATTTGAAATGTCAAGAAGAGGAGAAACCTGTTGTGATTCATAGCCCTGGATTCTACACTGG
CAAACCCGGGTACAAACTGTGCATGCGCTTGCACCTTCAGTTACCGACTGCTCAGCGCTGTGCAAACTATATATCCCTTTTT
GTCCACACAATGCAAGGAGAATATGACAGCCACCTCCCTTGGCCCTTCCAGGGTACAATACGCCTTACAATTCTTGATCAGT
CTGAAGCACCTGTAAGGCAAAACCACGAAGAGATAATGGATGCCAAACCAGAGCTGCTTGCTTTCCAGCGACCCACAATCCC
ACGGAACCCAAAAGGTTTTGGCTATGTAACTTTTATGCATCTGGAAGCCCTAAGACAAAGAACTTTCATTAAGGATGACACA
TTATTAGTGCGCTGTGAGGTCTCCACCCGCTTTGACATGGGTAGCCTTCGGAGGGAGGGTTTTCAGCCACGAAGTACTGATG
CAGGGGTATAG
Human K-Ras CDS
(SEQ ID NO: 35)
ATGACTGAATATAAACTTGTGGTAGTTGGAGCTGGTGGCGTAGGCAAGAGTGCCTTGACGATACAGCTAATTCAGAATCATT
TTGTGGACGAATATGATCCAACAATAGAGGATTCCTACAGGAAGCAAGTAGTAATTGATGGAGAAACCTGTCTCTTGGATAT
TCTCGACACAGCAGGTCAAGAGGAGTACAGTGCAATGAGGGACCAGTACATGAGGACTGGGGAGGGCTTTCTTTGTGTATTT
GCCATAAATAATACTAAATCATTTGAAGATATTCACCATTATAGAGAACAAATTAAAAGAGTTAAGGACTCTGAAGATGTAC
CTATGGTCCTAGTAGGAAATAAATGTGATTTGCCTTCTAGAACAGTAGACACAAAACAGGCTCAGGACTTAGCAAGAAGTTA
TGGAATTCCTTTTATTGAAACATCAGCAAAGACAAGACAGGGTGTTGATGATGCCTTCTATACATTAGTTCGAGAAATTCGA
AAACATAAAGAAAAGATGAGCAAAGATGGTAAAAAGAAGAAAAAGAAGTCAAAGACAAAGTGTGTAATTATGTAA
Human N-Ras CDS
(SEQ ID NO: 36)
ATGACTGAGTACAAACTGGTGGTGGTTGGAGCAGGTGGTGTTGGGAAAAGCGCACTGACAATCCAGCTAATCCAGAACCACT
TTGTAGATGAATATGATCCCACCATAGAGGATTCTTACAGAAAACAAGTGGTTATAGATGGTGAAACCTGTTTGTTGGACAT
ACTGGATACAGCTGGACAAGAAGAGTACAGTGCCATGAGAGACCAATACATGAGGACAGGCGAAGGCTTCCTCTGTGTATTT
GCCATCAATAATAGCAAGTCATTTGCGGATATTAACCTCTACAGGGAGCAGATTAAGCGAGTAAAAGACTCGGATGATGTAC
CTATGGTGCTAGTGGGAAACAAGTGTGATTTGCCAACAAGGACAGTTGATACAAAACAAGCCCACGAACTGGCCAAGAGTTA
CGGGATTCCATTCATTGAAACCTCAGCCAAGACCAGACAGGGTGTTGAAGATGCTTTTTACACACTGGTAAGAGAAATACGC
CAGTACCGAATGAAAAAACTCAACAGCAGTGATGATGGGACTCAGGGTTGTATGGGATTGCCATGTGTGGTGATGTAA
Human Raf CDS
(SEQ ID NO: 37)
ATGGCTAGCAAACGAAAATCTACAACTCCATGCATGGTTCGGACATCACAAGTAGTAGAACAAGATGTGCCCGAGGAAGTAG
ACAGGGCCAAAGAGAAAGGAATCGGCACACCACAGCCTGACGTGGCCAAGGACAGTTGGGCAGCAGAACTTGAAAACTCTTC
CAAAGAAAACGAAGTGATAGAGGTGAAATCTATGGGGGAAAGCCAGTCCAAAAAACTCCAAGGTGGTTATGAGTGCAAATAC
TGCCCCTACTCCACGCAAAACCTGAACGAGTTCACGGAGCATGTCGACATGCAGCATCCCAACGTGATTCTCAACCCCCTCT
ACGTGTGTGCAGAATGTAACTTCACAACCAAAAAGTACGACTCCCTATCCGACCACAACTCCAAGTTCCATCCCGGGGAGGC
CAACTTCAAGCTGAAGTTAATTAAACGCAATAATCAAACTGTCTTGGAACAGTCCATCGAAACCACCAACCATGTCGTGTCC
ATCACCACCAGTGGCCCTGGAACTGGTGACAGTGATTCTGGGATCTCGGTGAGTAAAACCCCCATCATGAAGCCTGGAAAAC
CAAAAGCGGATGCCAAGAAGGTGCCCAAGAAGCCCGAGGAGATCACCCCCGAGAACCACGTGGAAGGGACCGCCCGCCTGGT
GACAGACACAGCTGAGATCCTCTCGAGACTCGGCGGGGTGGAGCTCCTCCAAGACACATTAGGACACGTCATGCCTTCTGTA
CAGCTGCCACCAAATATCAACCTTGTGCCCAAGGTCCCTGTCCCACTAAATACTACCAAATACAACTCTGCCCTGGATACAA
ATGCCACGATGATCAACTCTTTCAACAAGTTTCCTTACCCGACCCAGGCTGAGTTGTCCTGGCTGACAGCTGCCTCCAAACA
CCCAGAGGAGCACATCAGAATCTGGTTTGCCACCCAGCGCTTAAAGCATGGCATCAGCTGGTCCCCAGAAGAGGTGGAGGAG
GCCCGGAAGAAGATGTTCAACGGCACCATCCAGTCAGTACCCCCGACCATCACTGTGCTGCCCGCCCAGTTGGCCCCCACAA
AGGTGACGCAGCCCATCCTCCAGACGGCTCTACCGTGCCAGATCCTCGGCCAGACTAGCCTGGTGCTGACTCAGGTGACCAG
CGGGTCAACAACCGTCTCTTGCTCCCCCATCACACTTGCCGTGGCAGGAGTCACCAACCATGGCCAGAAGAGACCCTTGGTG
ACTCCCCAAGCTGCCCCCGAACCCAAGCGTCCACACATCGCTCAGGTGCCAGAGCCCCCACCCAAGGTGGCCAACCCCCCGC
TCACACCAGCCAGTGACCGCAAGAAGACAAAGGAGCAGATAGCACATCTCAAGGCCAGCTTTCTCCAGAGCCAGTTCCCTGA
CGATGCCGAGGTTTACCGGCTCATCGAGGTGACTGGCCTTGCCAGGAGCGAGATCAAGAAGTGGTTCAGTGACCACCGATAT
CGGTGTCAAAGGGGCATCGTCCACATCACCAGCGAATCCCTTGCCAAAGACCAGTTGGCCATCGCGGCCTCCCGACACGGTC
GCACGTATCATGCGTACCCAGACTTTGCCCCCCAGAAGTTCAAAGAGAAAACACAGGGTCAGGTTAAAATCTTGGAAGACAG
CTTTTTGAAAAGTTCTTTTCCTACCCAAGCAGAACTGGATCGGCTAAGGGTGGAGACCAAGCTGAGCAGGAGAGAGATCGAC
TCCTGGTTCTCGGAGAGGCGGAAGCTTCGAGACAGCATGGAACAAGCTGTCTTGGATTCCATGGGGTCTGGCAAAAAAGGCC
AAGATGTGGGAGCCCCCAATGGTGCTCTGTCTCGACTCGACCAGCTCTCCGGTGCCCAGTTAACAAGTTCTCTGCCCAGCCC
TTCGCCAGCAATTGCAAAAAGTCAAGAACAGGTTCATCTCCTGAGGAGCACGTTTGCAAGAACCCAGTGGCCTACTCCCCAG
GAGTACGACCAGTTAGCGGCCAAGACTGGCCTGGTCCGAACTGAGATTGTGCGTTGGTTCAAGGAGAACAGATGCTTGCTGA
AAACGGGAACCGTGAAGTGGATGGAGCAGTACCAGCACCAGCCCATGGCAGATGATCACGGCTACGATGCCGTAGCAAGGAA
AGCAACAAAACCCATGGCCGAGAGCCCAAAGAACGGGGGTGATGTGGTTCCACAATATTACAAGGACCCCAAAAAGCTCTGC
GAAGAGGACTTGGAGAAGTTGGTGACCAGGGTAAAAGTAGGCAGCGAGCCAGCAAAAGACTGTTTGCCAGCAAAGCCCTCAG
AGGCCACCTCAGACCGGTCAGAGGGCAGCAGCCGGGACGGCCAGGGTAGCGACGAGAACGAGGAGTCGAGCGTTGTGGATTA
CGTGGAGGTGACGGTCGGGGAGGAGGATGCGATCTCAGATAGATCAGATAGCTGGAGTCAGGCTGCGGCAGAAGGTGTGTCG
GAACTGGCTGAATCAGACTCCGACTGCGTCCCTGCAGAGGCTGGCCAGGCCTAG
Human NMK1 CDS
(SEQ ID NO: 38)
ATGCCCAAGAAGAAGCCGACGCCCATCCAGCTGAACCCGGCCCCCGACGGCTCTGCAGTTAACGGGACCAGCTCTGCGGAGA
CCAACTTGGAGGCCTTGCAGAAGAAGCTGGAGGAGCTAGAGCTTGATGAGCAGCAGCGAAAGCGCCTTGAGGCCTTTCTTAC
CCAGAAGCAGAAGGTGGGAGAACTGAAGGATGACGACTTTGAGAAGATCAGTGAGCTGGGGGCTGGCAATGGCGGTGTGGTG
TTCAAGGTCTCCCACAAGCCTTCTGGCCTGGTCATGGCCAGAAAGCTAATTCATCTGGAGATCAAACCCGCAATCCGGAACC
AGATCATAAGGGAGCTGCAGGTTCTGCATGAGTGCAACTCTCCGTACATCGTGGGCTTCTATGGTGCGTTCTACAGCGATGG
CGAGATCAGTATCTGCATGGAGCACATGGATGGAGGTTCTCTGGATCAAGTCCTGAAGAAAGCTGGAAGAATTCCTGAACAA
ATTTTAGGAAAAGTTAGCATTGCTGTAATAAAAGGCCTGACATATCTGAGGGAGAAGCACAAGATCATGCACAGAGATGTCA
AGCCCTCCAACATCCTAGTCAACTCCCGTGGGGAGATCAAGCTCTGTGACTTTGGGGTCAGCGGGCAGCTCATCGACTCCAT
GGCCAACTCCTTCGTGGGCACAAGGTCCTACATGTCGCCAGAAAGACTCCAGGGGACTCATTACTCTGTGCAGTCAGACATC
TGGAGCATGGGACTGTCTCTGGTAGAGATGGCGGTTGGGAGGTATCCCATCCCTCCTCCAGATGCCAAGGAGCTGGAGCTGA
TGTTTGGGTGCCAGGTGGAAGGAGATGCGGCTGAGACCCCACCCAGGCCAAGGACCCCCGGGAGGCCCCTTAGCTCATACGG
AATGGACAGCCGACCTCCCATGGCAATTTTTGAGTTGTTGGATTACATAGTCAACGAGCCTCCTCCAAAACTGCCCAGTGGA
GTGTTCAGTCTGGAATTTCAAGATTTTGTGAATAAATGCTTAATAAAAAACCCCGCAGAGAGAGCAGATTTGAAGCAACTCA
TGGTTCATGCTTTTATCAAGAGATCTGATGCTGAGGAAGTGGATTTTGCAGGTTGGCTCTGCTCCACCATCGGCCTTAACCA
GCCCAGCACACCAACCCATGCTGCTGGCGTCTAA
Human NMK2 CADS
(SEQ ID NO: 39)
ATGCTGGCCCGGAGGAAGCCGGTGCTGCCGGCGCTCACCATCAACCCTACCATCGCCGAGGGCCCATCCCCTACCAGCGAGG
GCGCCTCCGAGGCAAACCTGGTGGACCTGCAGAAGAAGCTGGAGGAGCTGGAACTTGACGAGCAGCAGAAGAAGCGGCTGGA
AGCCTTTCTCACCCAGAAAGCCAAGGTCGGCGAACTCAAAGACGATGACTTCGAAAGGATCTCAGAGCTGGGCGCGGGCAAC
GGCGGGGTGGTCACCAAAGTCCAGCACAGACCCTCGGGCCTCATCATGGCCAGGAAGCTGATCCACCTTGAGATCAAGCCGG
CCATCCGGAACCAGATCATCCGCGAGCTGCAGGTCCTGCACGAATGCAACTCGCCGTACATCGTGGGCTTCTACGGGGCCTT
CTACAGTGACGGGGAGATCAGCATTTGCATGGAACACATGGACGGCGGCTCCCTGGACCAGGTGCTGAAAGAGGCCAAGAGG
ATTCCCGAGGAGATCCTGGGGAAAGTCAGCATCGCGGTTCTCCGGGGCTTGGCGTACCTCCGAGAGAAGCACCAGATCATGC
ACCGAGATGTGAAGCCCTCCAACATCCTCGTGAACTCTAGAGGGGAGATCAAGCTGTGTGACTTCGGGGTGAGCGGCCAGCT
CATCGACTCCATGGCCAACTCCTTCGTGGGCACGCGCTCCTACATGGCTCCGGAGCGGTTGCAGGGCACACATTACTCGGTG
CAGTCGGACATCTGGAGCATGGGCCTGTCCCTGGTGGAGCTGGCCGTCGGAAGGTACCCCATCCCCCCGCCCGACGCCAAAG
AGCTGGAGGCCATCTTTGGCCGGCCCGTGGTCGACGGGGAAGAAGGAGAGCCTCACAGCATCTCGCCTCGGCCGAGGCCCCC
CGGGCGCCCCGTCAGCGGTCACGGGATGGATAGCCGGCCTGCCATGGCCATCTTTGAACTCCTGGACMCFATTGTGAACGAG
CCACCTCCTAAGCTGCCCAACGGTGTGTTCACCCCCGACTTCCAGGAGTTTGTCAATAAATGCCTCATCAAGAACCCAGCGG
AGCGGGCGGACCTGAAGATGCTCACAAACCACACCTTCATCAAGCGGTCCGAGGTGGAAGAAGTGGATTTTGCCGGCTGGTT
GTGTAAAACCCTGCGGCTGAACCAGCCCGGCACACCCACGCGCACCGCCGTGTGA
Human ERK1 CDS
(SEQ ID NO: 40)
ATGGCGGCGGCGGCGGCTCAGGGGGGCGGGGGCGGGGAGCCCCGTAGAACCGAGGGGGTCGGCCCGGGGGTCCCGGGGGAGG
TGGAGATGGTGAAGGGGCAGCCGTTCGACGTGGGCCCGCGCTACACGCAGTTGCAGTACATCGGCGAGGGCGCGTACGGCAT
GGTCAGCTCGGCCTATGACCACGTGCGCAAGACTCGCGTGGCCATCAAGAAGATCAGCCCCTTCGAACATCAGACCTACTGC
CAGCGCACGCTCCGGGAGATCCAGATCCTGCTGCGCTTCCGCCATGAGAATGTCATCGGCATCCGAGACATTCTGCGGGCGT
CCACCCTGGAAGCCATGAGAGATGTCTACATTGTGCAGGACCTGATGGAGACTGACCTGTACAAGTTGCTGAAAAGCCAGCA
GCTGAGCAATGACCATATCTGCTACTTCCTCTACCAGATCCTGCGGGGCCTCAAGTACATCCACTCCGCCAACGTGCTCCAC
CGAGATCTAAAGCCCTCCAACCTGCTCATCAACACCACCTGCGACCTTAAGATTTGTGATTTCGGCCTGGCCCGGATTGCCG
ATCCTGAGCATGACCACACCGGCTTCCTGACGGAGTATGTGGCTACGCGCTGGTACCGGGCCCCAGAGATCATGCTGAACTC
CAAGGGCTATACCAAGTCCATCGACATCTGGTCTGTGGGCTGCATTCTGGCTGAGATGCTCTCTAACCGGCCCATCTTCCCT
GGCAAGCACTACCTGGATCAGCTCAACCACATTCTGGGCATCCTGGGCTCCCCATCCCAGGAGGACCTGAATTGTATCATCA
ACATGAAGGCCCGAAACTACCTACAGTCTCTGCCCTCCAAGACCAAGGTGGCTTGGGCCAAGCTTTTCCCCAAGTCAGACTC
CAAAGCCCTTGACCTGCTGGACCGGATGTTAACCTTTAACCCCAATAAACGGATCACAGTGGAGGAAGCGCTGGCTCACCCC
TACCTGGAGCAGTACTATGACCCGACGGATGAGGTGGGCCAGTCCCCAGCAGCAGTGGGGCTGGGGGCAGGGGAGCAGGGGG
GCACGTAG
Human ERK2 CDS
(SEQ ID NO: 41)
ATGGCGGCGGCGGCGGCGGCGGGCGCGGGCCCGGAGATGGTCCGCGGGCAGGTGTTCGACGTGGGGCCGCGCTACACCAACC
TCTCGTACATCGGCGAGGGCGCCTACGGCATGGTGTGCTCTGCTTATGATAATGTCAACAAAGTTCGAGTAGCTATCAAGAA
AATCAGCCCCTTTGAGCACCAGACCTACTGCCAGAGAACCCTGAGGGAGATAAAAATCTTACTGCGCTTCAGACATGAGAAC
ATCATTGGAATCAATGACATTATTCGAGCACCAACCATCGAGCAAATGAAAGATGTATATATAGTACAGGACCTCATGGAAA
CAGATCTTTACAAGCTCTTGAAGACACAACACCTCAGCAATGACCATATCTGCTATTTTCTCTACCAGATCCTCAGAGGGTT
AAAATATATCCATTCAGCTAACGTTCTGCACCGTGACCTCAAGCCTTCCAACCTGCTGCTCAACACCACCTGTGATCTCAAG
ATCTGTGACTTTGGCCTGGCCCGTGTTGCAGATCCAGACCATGATCACACAGGGTTCCTGACAGAATATGTGGCCACACGTT
GGTACAGGGCTCCAGAAATTATGTTGAATTCCAAGGGCTACACCAAGTCCATTGATATTTGGTCTGTAGGCTGCATTCTGGC
AGAAATGCTTTCTAACAGGCCCATCTTTCCAGGGAAGCATTATCTTGACCAGCTGAACCACATTTTGGGTATTCTTGGATCC
CCATCACAAGAAGACCTGAATTGTATAATAAATTTAAAAGCTAGGAACTATTTGCTTTCTCTTCCACACAAAAATAAGGTGC
CATGGAACAGGCTGTTCCCAAATGCTGACTCCAAAGCTCTGGACTTATTGGACAAAATGTTGACATTCAACCCACACAAGAG
GATTGAAGTAGAACAGGCTCTGGCCCACCCATATCTGGAGCAGTATTACGACCCGAGTGACGAGCCCATCGCCGAAGCACCA
TTCAAGTTCGACATGGAATTGGATGACTTGCCTAAGGAAAAGCTCAAAGAACTAATTTTTGAAGAGACTGCTAGATTCCAGC
CAGGATACAGATCTTAA
Human IκB CDS
(SEQ ID NO: 42)
ATGTTCCAGGCGGCCGAGCGCCCCCAGGAGTGGGCCATGGAGGGCCCCCGCGACGGGCTGAAGAAGGAGCGGCTACTGGACG
ACCGCCACGACAGCGGCCTGGACTCCATGAAAGACGAGGAGTACGAGCAGATGGTCAAGGAGCTGCAGGAGATCCGCCTCGA
GCCGCAGGAGGTGCCGCGCGGCTCGGAGCCCTGGAAGCAGCAGCTCACCGAGGACGGGGACTCGTTCCTGCACTTGGCCATC
ATCCATGAAGAAAAGGCACTGACCATGGAAGTGATCCGCCAGGTGAAGGGAGACCTGGCCTTCCTCAACTTCCAGAACAACC
TGCAGCAGACTCCACTCCACTTGGCTGTGATCACCAACCAGCCAGAAATTGCTGAGGCACTTCTGGGAGCTGGCTGTGATCC
TGAGCTCCGAGACTTTCGAGGAAATACCCCCCTACACCTTGCCTGTGAGCAGGGCTGCCTGGCCAGCGTGGGAGTCCTGACT
CAGTCCTGCACCACCCCGCACCTCCACTCCATCCTGAAGGCTACCAACTACAATGGCCACACGTGTCTACACTTAGCCTCTA
TCCATGGCTACCTGGGCATCGTGGAGCTTTTGGTGTCCTTGGGTGCTGATGTCAATGCTCAGGAGCCCTGTAATGGCCGGAC
TGCCCTTCACCTCGCAGTGGACCTGCAAAATCCTGACCTGGTGTCACTCCTGTTGAAGTGTGGGGCTGATGTCAACAGAGTT
ACCTACCAGGGCTATTCTCCCTACCAGCTCACCTGGGGCCGCCCAAGCACCCGGATACAGCAGCAGCTGGGCCAGCTGACAC
TAGAAAACCTTCAGATGCTGCCAGAGAGTGAGGATGAGGAGAGCTATGACACAGAGTCAGAGTTCACGGAGTTCACAGAGGA
CGAGCTGCCCTATGATGACTGTGTGTTTGGAGGCCAGCGTCTGACGTTATGA
Human Rac CDS
(SEQ ID NO: 43)
ATGAGCGACGTGGCTATTGTGAAGGAGGGTTGGCTGCACAAACGAGGGGAGTACATCAAGACCTGGCGGCCACGCTACTTCC
TCCTCAAGAATGATGGCACCTTCATTGGCTACAAGGAGCGGCCGCAGGATGTGGACCAACGTGAGGCTCCCCTCAACAACTT
CTCTGTGGCGCAGTGCCAGCTGATGAAGACGGAGCGGCCCCGGCCCAACACCTTCATCATCCGCTGCCTGCAGTGGACCACT
GTCATCGAACGCACCTTCCATGTGGAGACTCCTGAGGAGCGGGAGGAGTGGACAACCGCCATCCAGACTGTGGCTGACGGCC
TCAAGAAGCAGGAGGAGGAGGAGATGGACTTCCGGTCGGGCTCACCCAGTGACAACTCAGGGGCTGAAGAGATGGAGGTGTC
CCTGGCCAAGCCCAAGCACCGCGTGACCATGAACGAGTTTGAGTACCTGAAGCTGCTGGGCAAGGGCACTTTCGGCAAGGTG
ATCCTGGTGAAGGAGAAGGCCACAGGCCGCTACTACGCCATGAAGATCCTCAAGAAGGAAGTCATCGTGGCCAAGGACGAGG
TGGCCCACACACTCACCGAGAACCGCGTCCTGCAGAACTCCAGGCACCCCTTCCTCACAGCCCTGAAGTACTCTTTCCAGAC
CCACGACCGCCTCTGCTTTGTCATGGAGTACGCCAACGGGGGCGAGCTGTTCTTCCACCTGTCCCGGGAGCGTGTGTTCTCC
GAGGACCGGGCCCGCTTCTATGGCGCTGAGATTGTGTCAGCCCTGGACTACCTGCACTCGGAGAAGAACGTGGTGTACCGGG
ACCTCAAGCTGGAGAACCTCATGCTGGACAAGGACGGGCACATTAAGATCACAGACTTCGGGCTGTGCAAGGAGGGGATCAA
GGACGGTGCCACCATGAAGACCTTTTGCGGCACACCTGAGTACCTGGCCCCCGAGGTGCTGGAGGACAATGACTACGGCCGT
GCAGTGGACTGGTGGGGGCTGGGCGTGGTCATGTACGAGATGATGTGCGGTCGCCTGCCCTTCTACAACCAGGACCATGAGA
AGCTTTTTGAGCTCATCCTCATGGAGGAGATCCGCTTCCCGCGCACGCTTGGTCCCGAGGCCAAGTCCTTGCTTTCAGGGCT
GCTCAAGAAGGACCCCAAGCAGAGGCTTGGCGGGGGCTCCGAGGACGCCAAGGAGATCATGCAGCATCGCTTCTTTGCCGGT
ATCGTGTGGCAGCACGTGTACGAGAAGAAGCTCAGCCCACCCTTCAAGCCCCAGGTCACGTCGGAGACTGACACCAGGTATT
TTGATGAGGAGTTCACGGCCCAGATGATCACCATCACACCACCTGACCAAGATGACAGCATGGAGTGTGTGGACAGCGAGCG
CAGGCCCCACTTCCCCCAGTTCTCCTACTCGGCCAGCGGCACGGCCTGA
Human MEK3 CDS
(SEQ ID NO: 44)
ATGTCCAAGCCACCCGCACCCAACCCCACACCCCCCCGGAACCTGGACTCCCGGACCTTCATCACCATTGGAGACAGAAACT
TTGAGGTGGAGGCTGATGACTTGGTGACCATCTCAGAACTGGGCCGTGGAGCCTATGGGGTGGTAGAGAAGGTGCGGCACGC
CCAGAGCGGCACCATCATGGCCGTGAAGCGGATCCGGGCCACCGTGAACTCACAGGAGCAGAAGCGGCTGCTCATGGACCTG
GACATCAACATGCGCACGGTCGACTGTTTCTACACTGTCACCTTCTACGGGGCACTATTCAGAGAGGGAGACGTGTGGATCT
GCATGGAGCTCATGGACACATCCTTGGACAAGTTCTACCGGAAGGTGCTGGATAAAAACATGACAATTCCAGAGGACATCCT
TGGGGAGATTGCTGTGTCTATCGTGCGGGCCCTGGAGCATCTGCACAGCAAGCTGTCGGTGATCCACAGAGATGTGAAGCCC
TCCAATGTCCTTATCAACAAGGAGGGCCATGTGAAGATGTGTGACTTTGGCATCAGTGGCTACTTGGTGGACTCTGTGGCCA
AGACGATGGATGCCGGCTGCAAGCCCTACATGGCCCCTGAGAGGATCAACCCAGAGCTGAACCAGAAGGGCTACAATGTCAA
GTCCGACGTCTGGAGCCTGGGCATCACCATGATTGAGATGGCCATCCTGCGGTTCCCTTACGAGTCCTGGGGGACCCCGTTC
CAGCAGCTGAAGCAGGTGGTGGAGGAGCCGTCCCCCCAGCTCCCAGCCGACCGTTTCTCCCCCGAGTTTGTGGACTTCACTG
CTCAGTGCCTGAGGAAGAACCCCGCAGAGCGTATGAGCTACCTGGAGCTGATGGAGCACCCCTTCTTCACCTTGCACAAAAC
CAAGAAGACGGACATTGCTGCCTTCGTGAAGGAGATCCTGGGAGAAGACTCATAG
Human MEK6 CDS
(SEQ ID NO: 45)
ATGGAACTGGGACGAGGTGCGTACGGGGTGGTGGAGAAGATGCGGCACGTGCCCAGCGGGCAGATCATGGCAGTGAAGCGGA
TCCGAGCCACAGTAAATAGCCAGGAACAGAAACGGCTACTGATGGATTTGGATATTTCCATGAGGACGGTGGACTGTCCATT
CACTGTCACCTTTTATGGCGCACTGTTTCGGGAGGGTGATGTGTGGATCTGCATGGAGCTCATGGATACATCACTAGATAAA
TTCTACAAACAAGTTATTGATAAAGGCCAGACAATTCCAGAGGACATCTTAGGGAAAATAGCAGTTTCTATTGTAAAAGCAT
TAGAACATTTACATAGTAAGCTGTCTGTCATTCACAGAGACGTCAAGCCTTCTAATGTACTCATCAATGCTCTCGGTCAAGT
GAAGATGTGCGATTTTGGAATCAGTGGCTACTTGGTGGACTCTGTTGCTAAAACAATTGATGCAGGTTGCAAACCATACATG
GCCCCTGAAAGAATAAACCCAGAGCTCAACCAGAAGGGATACAGTGTGAAGTCTGACATTTGGAGTCTGGGCATCACGATGA
TTGAGTTGGCCATCCTTCGATTTCCCTATGATTCATGGGGAACTCCATTTCAGCAGCTCAAACAGGTGGTAGAGGAGCCATC
GCCACAACTCCCAGCAGACAAGTTCTCTGCAGAGTTTGTTGACTTTACCTCACAGTGCTTAAAGAAGAATTCCAAAGAACGG
CCTACATACCCAGAGCTAATGCAACATCCATTTTTCACCCTACATGAATCCAAAGGAACAGATGTGGCATCTTTTGTAAAAC
TGATTCTTGGAGACTAA
Human p38 CDS
(SEQ ID NO: 46)
ATGTCTCAGGAGAGGCCCACGTTCTACCGGCAGGAGCTGAACAAGACAATCTGGGAGGTGCCCGAGCGTTACCAGAACCTGT
CTCCAGTGGGCTCTGGCGCCTATGGCTCTGTGTGTGCTGCTTTTGACACAAAAACGGGGTTACGTGTGGCAGTGAAGAAGCT
CTCCAGACCATTTCAGTCCATCATTCATGCGAAAAGAACCTACAGAGAACTGCGGTTACTTAAACATATGAAACATGAAAAT
GTGATTGGTCTGTTGGACGTTTTTACACCTGCAAGGTCTCTGGAGGAATTCAATGATGTGTATCTGGTGACCCATCTCATGG
GGGCAGATCTGAACAACATTGTGAAATGTCAGAAGCTTACAGATGACCATGTTCAGTTCCTTATCTACCAAATTCTCCGAGG
TCTAAAGTATATACATTCAGCTGACATAATTCACAGGGACCTAAAACCTAGTAATCTAGCTGTGAATGAAGACTGTGAGCTG
AAGATTCTGGATTTTGGACTGGCTCGGCACACAGATGATGAAATGACAGGCTACGTGGCCACTAGGTGGTACAGGGCTCCTG
AGATCATGCTGAACTGGATGCATTACAACCAGACAGTTGATATTTGGTCAGTGGGATGCATAATGGCCGAGCTGTTGACTGG
AAGAACATTGTTTCCTGGTACAGACCATATTAACCAGCTTCAGCAGATTATGCGTCTGACAGGAACACCCCCCGCTTATCTC
ATTAACAGGATGCCAAGCCATGAGGCAAGAAACTATATTCAGTCTTTGACTCAGATGCCGAAGATGAACTTTGCGAATGTAT
TTATTGGTGCCAATCCCCTGGCTGTCGACTTGCTGGAGAAGATGCTTGTATTGGACTCAGATAAGAGAATTACAGCGGCCCA
AGCCCTTGCACATGCCTACTTTGCTCAGTACCACGATCCTGATGATGAACCAGTGGCCGATCCTTATGATCAGTCCTTTGAA
AGCAGGGACCTCCTTATAGATGAGTGGAAAAGCCTGACCTATGATGAAGTCATCAGCTTTGTGCCACCACCCCTTGACCAAG
AAGAGATGGAGTCCTGA
Human PKR CDS
(SEQ ID NO: 47)
ATGGCTGGTGATCTTTCAGCAGGTTTCTTCATGGAGGAACTTAATACATACCGTCAGAAGCAGGGAGTAGTACTTAAATATC
AAGAACTGCCTAATTCAGGACCTCCACATGATAGGAGGTTTACATTTCAAGTTATAATAGATGGAAGAGAATTTCCAGAAGG
TGAAGGTAGATCAAAGAAGGAAGCAAAAAATGCCGCAGCCAAATTAGCTGTTGAGATACTTAATAAGGAAAAGAAGGCAGTT
AGTCCTTTATTATTGACAACAACGAATTCTTCAGAAGGATTATCCATGGGGAATTACATAGGCCTTATCAATAGAATTGCCC
AGAAGAAAAGACTAACTGTAAATTATGAACAGTGTGCATCGGGGGTGCATGGGCCAGAAGGATTTCATTATAAATGCAAAAT
GGGACAGAAAGAATATAGTATTGGTACAGGTTCTACTAAACAGGAAGCAAAACAATTGGCCGCTAAACTTGCATATCTTCAG
ATATTATCAGAAGAAACCTCAGTGAAATCTGACTACCTGTCCTCTGGTTCTTTTGCTACTACGTGTGAGTCCCAAAGCAACT
CTTTAGTGACCAGCACACTCGCTTCTGAATCATCATCTGAAGGTGACTTCTCAGCAGATACATCAGAGATAAATTCTAACAG
TGACAGTTTAAACAGTTCTTCGTTGCTTATGAATGGTCTCAGAAATAATCAAAGGAAGGCAAAAAGATCTTTGGCACCCAGA
TTTGACCTTCCTGACATGAAAGAAACAAAGTATACTGTGGACAAGAGGTTTGGCATGGATTTTAAAGAAATAGAATTAATTG
GCTCAGGTGGATTTGGCCAAGTTTTCAAAGCAAAACACAGAATTGACGGAAAGACTTACGTTATTAAACGTGTTAAATATAA
TAACGAGAAGGCGGAGCGTGAAGTAAAAGCATTGGCAAAACTTGATCATGTAAATATTGTTCACTACAATGGCTGTTGGGAT
GGATTTGATTATGATCCTGAGACCAGTGATGATTCTCTTGAGAGCAGTGATTATGATCCTGAGAACAGCAAAAATAGTTCAA
GGTCAAAGACTAAGTGCCTTTTCATCCAAATGGAATTCTGTGATAAAGGGACCTTGGAACAATGGATTGAAAAAAGAAGAGG
CGAGAAACTAGACAAAGTTTTGGCTTTGGAACTCTTTGAACAAATAACAAAAGGGGTGGATTATATACATTCAAAAAAATTA
ATTCATAGAGATCTTAAGCCAAGTAATATATTCTTAGTAGATACAAAACAAGTAAAGATTGGAGACTTTGGACTTGTAACAT
CTCTGAAAAATGATGGAAAGCGAACAAGGAGTAAGGGAACTTTGCGATACATGAGCCCAGAACAGATTTCTTCGCAAGACTA
TGGAAAGGAAGTGGACCTCTACGCTTTGGGGCTAATTCTTGCTGAACTTCTTCATGTATGTGACACTGCTTTTGAAACATCA
AAGTTTTTCACAGACCTACGGGATGGCATCATCTCAGATATATTTGATAAAAAAGAAAAAACTCTTCTACAGAAATTACTCT
CAAAGAAACCTGAGGATCGACCTAACACATCTGAAATACTAAGGACCTTGACTGTGTGGAAGAAAAGCCCAGAGAAAAATGA
ACGACACACATGTTAG
Human TTP CDS
(SEQ ID NO: 48)
ATGGCGGCTCAGCGGATCCGAGCGGCCAACTCCAATGGCCTCCCTCGCTGCAAGTCAGAGGGGACCCTGATTGACCTGAGCG
AAGGGTTTTCAGAGACGAGCTTTAATGACATCAAAGTGCCTTCTCCCAGTGCCTTGCTCGTAGACAACCCCACACCTTTCGG
AAATGCAAAGGAAGTGATTGCGATCAAGGACTATTGCCCCACCAACTTCACCACACTGAAGTTCTCCAAGGGCGACCATCTC
TACGTCTTGGACACATCTGGCGGTGAGTGGTGGTACGCACACAACACCACCGAAATGGGCTACATCCCCTCCTCCTATGTGC
AGCCCTTGAACTACCGGAACTCAACACTGAGTGACAGCGGTATGATTGATAATCTTCCAGACAGCCCAGACGAGGTAGCCAA
GGAGCTGGAGCTGCTCGGGGGATGGACAGATGACAAAAAAGTACCAGGCAGAATGTACAGTAATAACCCTTTCTGGAATGGG
GTCCAGACCAATCCATTTCTGAATGGGAACGTGCCCGTCATGCCCAGCCTGGATGAGCTGAATCCCAAAAGTACTGTGGATT
TGCTCCTTTTTGACGCAGGTACATCCTCCTTCACCGAATCCAGCTCAGCCACCACGAATAGCACTGGCAACATCTTCGATGA
GCTTCCAGTCACAAACGGACTCCACGCAGAGCCGCCGGTCAGGCGGGACAACCCCTTCTTCAGAAGCAAGCGCTCCTACAGT
CTCTCGGAACTCTCCGTCCTCCAAGCCAAGTCCGATGCTCCCACATCGTCGAGTTTCTTCACCGGCTTGAAATCACCTGCCC
CCGAGCAATTTCAGAGCCGGGAGGATTTTCGAACTGCCTGGCTAAACCACAGGAAGCTGGCCCGGTCTTGCCACGACCTGGA
CTTGCTTGGCCAAAGCCCTGGTTGGGGCCAGACCCAAGCCGTGGAGACAAACATCGTGTGCAAGCTGGATAGCTCCGGGGGT
GCTGTCCAGCTTCCTGACACCAGCATCAGCATCCACGTGCCCGAGGGCCACGTCGCCCCTGGGGAGACCCAGCAGATCTCCA
TGAAAGCCCTGCTGGACCCCCCGCTGGAGCTCAACAGTGACAGGTCCTGCAGCATCAGCCCTGTGCTGGAGGTCAAGCTGAG
CAACCTGGAGGTGAAAACCTCTATCATCTTGGAGATGAAAGTGTCAGCCGAGATAAAAAATGACCTTTTTAGCAAAAGCACA
GTGGGCCTCCAGTGCCTGAGGAGCGACTCGAAGGAAGGGCCATATGTCTCCGTCCCGCTCAACTGCAGCTGTGGGGACACGG
TCCAGGCACAGCTGCACAACCTGGAGCCCTGTATGTACGTGGCTGTCGTGGCCCATGGCCCAAGCATCCTCTACCCTTCCAC
CGTGTGGGACTTCATCAATAAAAAAGTCACAGTGGGTCTCTACGGCCCTAAACACATCCACCCATCCTTCAAGACGGTAGTG
ACCATTTTTGGGCATGACTGTGCCCCAAAGACGCTCCTGGTCAGCGAGGTCACACGCCAGGCACCCAACCCTGCCCCGGTGG
CCCTGCAGCTGTGGGGGAAGCACCAGTTCGTTTTGTCCAGGCCCCAGGATCTCAAGGTCTGTATGTTTTCCAATATGACGAA
TTACGAGGTCAAAGCCAGCGAGCAGGCCAAAGTGGTGCGAGGATTCCAGCTGAAGCTGGGCAAGGTGAGCCGCCTGATCTTC
CCCATCACCTCCCAGAACCCCAACGAGCTCTCTGACTTCACGCTGCGGGTTCAGGTGAAGGACGACCAGGAGGCCATCCTCA
CCCAGTTTTGTGTCCAGACTCCTCAGCCACCCCCTAAAAGTGCCATCAAGCCTTCCGGGCAAAGGAGGTTTCTCAAGAAGAA
CGAAGTCGGGAAAATCATCCTGTCCCCGTTTGCCACCACTACAAAGTACCCGACTTTCCAGGACCGCCCGGTGTCCAGCCTC
AAGTTTGGTAAGTTGCTCAAGACTGTGGTGCGGCAGAACAAGAACCACTACCTGCTGGAGTACAAGAAGGGCGACGGGATCG
CCCTGCTCAGCGAGGAGCGGGTCAGGCTCCGGGGCCAGCTGTGGACCAAGGAGTGGTACATCGGCTACTACCAGGGCAGGGT
GGGCCTCGTGCACACCAAGAACGTGCTGGTGGTCGGCAGGGCCCGGCCCAGCCTGTGCTCGGGCCCCGAGCTGAGCACCTCG
GTGCTGCTGGAGCAGATCCTGCGGCCCTGCAAATTCCTCACGTACATCTATGCCTCCGTGAGGACCCTGCTCATGGAGAACA
TCAGCAGCTGGCGCTCCTTCGCTGACGCCCTGGGCTACGTGAACCTGCCGCTCACCTTTTTCTGCCGGGCAGAGCTGGATAG
TGAGCCCGAGCGGGTGGCGTCCGTCCTAGAAAAGCTGAAGGAGGACTGTAACAACACTGAGAACAAAGAACGGAAGTCCTTC
CAGAAGGAGCTTGTGATGGCCCTACTGAAGATGGACTGCCAGGGCCTGGTGGTCAGACTCATCCAGGACTTTGTGCTCCTGA
CCACGGCTGTAGAGGTGGCCCAGCGCTGGCGGGAGCTGGCTGAGAAGCTGGCCAAGGTCTCCAAGCAGCAGATGGACGCCTA
CGAGTCTCCCCACCGGGACAGGAACGGGGTTGTGGACAGCGAGGCCATGTGGAAGCCTGCGTATGACTTCTTACTCACCTGG
AGCCATCAGATCGGGGACAGCTACCGGGATGTCATCCAGGAGCTGCACCTGGGCCTGGACAAGATGAAAAACCCCATCACCA
AGCGCTGGAAGCACCTCACTGGGACTCTGATCTTGGTGAACTCCCTGGACGTTCTGAGAGCAGCCGCCTTCAGCCCTGCGGA
CCAGGACGACTTCGTGATTTGA
Human NEK2 CDS
(SEQ ID NO: 49)
ATGCTGTCCAACTCCCAGGGCCAGAGCCCGCCGGTGCCGTTCCCCGCCCCGGCCCCGCCGCCGCAGCCCCCCACCCCTGCCC
TGCCGCACCCCCCGGCGCAGCCGCCGCCGCCGCCCCCGCAGCAGTTCCCGCAGTTCCACGTCAAGTCCGGCCTGCAGATCAA
GAAGAACGCCATCATCGATGACTACAAGGTCACCAGCCAGGTCCTGGGGCTGGGCATCAACGGCAAAGTTTTGCAGATCTTC
AACAAGAGGACCCAGGAGAAATTCGCCCTCAAAATGCTTCAGGACTGCCCCAAGGCCCGCAGGGAGGTGGAGCTGCACTGGC
GGGCCTCCCAGTGCCCGCACATCGTACGGATCGTGGATGTGTACGAGAATCTGTACGCAGGGAGGAAGTGCCTGCTGATTGT
CATGGAATGTTTGGACGGTGGAGAACTCTTTAGCCGAATCCAGGATCGAGGAGACCAGGCATTCACAGAAAGAGAAGCATCC
GAAATCATGAAGAGCATCGGTGAGGCCATCCAGTATCTGCATTCAATCAACATTGCCCATCGGGATGTCAAGCCTGAGAATC
TCTTATACACCTCCAAAAGGCCCAACGCCATCCTGAAACTCACTGACTTTGGCTTTGCCAAGGAAACCACCAGCCACAACTC
TTTGACCACTCCTTGTTATACACCGTACTATGTGGCTCCAGAAGTGCTGGGTCCAGAGAAGTATGACAAGTCCTGTGACATG
TGGTCCCTGGGTGTCATCATGTACATCCTGCTGTGTGGGTATCCCCCCTTCTACTCCAACCACGGCCTTGCCATCTCTCCGG
GCATGAAGACTCGCATCCGAATGGGCCAGTATGAATTTCCCAACCCAGAATGGTCAGAAGTATCAGAGGAAGTGAAGATGCT
CATTCGGAATCTGCTGAAAACAGAGCCCACCCAGAGAATGACCATCACCGAGTTTATGAACCACCCTTGGATCATGCAATCA
ACAAAGGTCCCTCAAACCCCACTGCACACCAGCCGGGTCCTGAAGGAGGACAAGGAGCGGTGGGAGGATGTCAAGGGGTGTC
TTCATGACAAGAACAGCGACCAGGCCACTTGGCTGACCAGGTTGTGA

[0336] An antisense nucleic acid molecule can be complementary to all or part of a non-coding region of the coding strand of a nucleotide sequence encoding a TNFα, TNFR1, TNFR2, TRADD, TRAF2, MEKK1/4, MEKK4/7, JNK, AP-1, ASK1, RIP, MEKK 3/6, MAPK, NIK, IKK, NF-κB, CD14, MyD88, IRAK, lipopolysaccharide binding protein (LBP), TRAF6, ras, raf, MEK1/2, ERK1/2, NIK, IKK, IκB, NF-κB, rac, MEK4/7, JNK, c-jun, MEK3/6, p38, PKR, TTP, or MK2 protein. Non-coding regions (5′ and 3′ untranslated regions) are the 5′ and 3′ sequences that flank the coding region in a gene and are not translated into amino acids.

[0337] Based upon the sequences disclosed herein, one of skill in the art can easily choose and synthesize any of a number of appropriate antisense nucleic acids to target a nucleic acid encoding a TNFα, TNFR1, TNFR2, TRADD, TRAF2, MEKK1/4, MEKK4/7, JNK, AP-1, ASK1, RIP, MEKK 3/6, MAPK, NIK, IKK, NF-1<B, CD14, MyD88, IRAK, lipopolysaccharide binding protein (LBP), TRAF6, ras, raf, MEK1/2, ERK1/2, NIK, IKK, IκB, NF-κB, rac, MEK4/7, JNK, c-jun, MEK3/6, p38, PKR, TTP, or MK2 protein described herein. Antisense nucleic acids targeting a nucleic acid encoding a TNFα, TNFR1, TNFR2, TRADD, TRAF2, MEKK1/4, MEKK4/7, JNK, AP-1, ASK1, RIP, MEKK 3/6, MAPK, NIK, IKK, NF-κB, CD14, MyD88, IRAK, lipopolysaccharide binding protein (LBP), TRAF6, ras, raf, MEK1/2, ERK1/2, NIK, IKK, IκB, NF-κB, rac, MEK4/7, JNK, c-jun, MEK3/6, p38, PKR, TTP, or MK2 protein can be designed using the software available at the Integrated DNA Technologies website.

[0338] An antisense nucleic acid can be, for example, about 5, 10, 15, 20, 25, 30, 35, 40, 45, or 50 nucleotides or more in length. An antisense oligonucleotide can be constructed using chemical synthesis and enzymatic ligation reactions using procedures known in the art. For example, an antisense nucleic acid can be chemically synthesized using naturally occurring nucleotides or variously modified nucleotides designed to increase the biological stability of the molecules or to increase the physical stability of the duplex formed between the antisense and sense nucleic acids, e.g., phosphorothioate derivatives and acridine substituted nucleotides can be used.

[0339] Examples of modified nucleotides which can be used to generate an antisense nucleic acid include 5-fluorouracil, 5-bromouracil, 5-chlorouracil, 5-iodouracil, hypoxanthine, xanthine, 4-acetylcytosine, 5-(carboxyhydroxylmethyl) uracil, 5-carboxymethylaminomethyl-2-thiouridine, 5-carboxymethylaminomethyluracil, dihydrouracil, beta-D-galactosylqueosine, inosine, N6-isopentenyladenine, 1-methylguanine, 1-methylinosine, 2,2-dimethylguanine, 2-methyladenine, 2-methylguanine, 3-methylcytosine, 5-methylcytosine, N6-adenine, 7-methylguanine, 5-methylaminomethyluracil, 5-methoxyaminomethyl-2-thiouracil, beta-D-mannosylqueosine, 5′-methoxycarboxymethyluracil, 5-methoxyuracil, 2-methylthio-N6-isopentenyladenine, uracil-5-oxyacetic acid (v), wybutoxosine, pseudouracil, queosine, 2-thiocytosine, 5-methyl-2-thiouracil, 2-thiouracil, 4-thiouracil, 5-methyluracil, uracil-5-oxyacetic acid methylester, uracil-5-oxyacetic acid (v), 5-methyl-2-thiouracil, 3-(3-amino-3-N-2-carboxypropyl) uracil, (acp3)w, and 2,6-diaminopurine. Alternatively, the antisense nucleic acid can be produced biologically using an expression vector into which a nucleic acid has been subcloned in an antisense orientation (i.e., RNA transcribed from the inserted nucleic acid will be of an antisense orientation to a target nucleic acid of interest).

[0340] The antisense nucleic acid molecules described herein can be prepared in vitro and administered to a mammal, e.g., a human. Alternatively, they can be generated in situ such that they hybridize with or bind to cellular mRNA and/or genomic DNA encoding a TNFα, TNFR1, TNFR2, TRADD, TRAF2, MEKK1/4, MEKK4/7, JNK, AP-1, ASK1, RIP, MEKK 3/6, MAPK, NIK, IKK, NF-κB, CD14, MyD88, IRAK, LBP, TRAF6, ras, raf, MEK1/2, ERK1/2, NIK, IKK, IκB, NF-κB, rac, MEK4/7, JNK, c-jun, MEK3/6, p38, PKR, TTP, or MK2 protein to thereby inhibit expression, e.g., by inhibiting transcription and/or translation. The hybridization can be by conventional nucleotide complementarities to form a stable duplex, or, for example, in the case of an antisense nucleic acid molecule that binds to DNA duplexes, through specific interactions in the major groove of the double helix. The antisense nucleic acid molecules can be delivered to a mammalian cell using a vector (e.g., a lentivirus, a retrovirus, or an adenovirus vector).

[0341] An antisense nucleic acid can be an α-anomeric nucleic acid molecule. An α-anomeric nucleic acid molecule forms specific double-stranded hybrids with complementary RNA in which, contrary to the usual, β-units, the strands run parallel to each other (Gaultier et al., Nucleic Acids Res. 15:6625-6641, 1987). The antisense nucleic acid can also comprise a 2′-O-methylribonucleotide (Inoue et al., Nucleic Acids Res. 15:6131-6148, 1987) or a chimeric RNA-DNA analog (Inoue et al., FEBS Lett. 215:327-330, 1987).

[0342] Another example of an inhibitory nucleic acid is a ribozyme that has specificity for a nucleic acid encoding a TNFα, TNFR1, TNFR2, TRADD, TRAF2, MEKK1/4, MEKK4/7, JNK, AP-1, ASK1, RIP, MEKK 3/6, MAPK, NIK, IKK, NF-κB, CD14, MyD88, IRAK, lipopolysaccharide binding protein (LBP), TRAF6, ras, raf, MEK1/2, ERK1/2, NIK, IKK, IκB, NF-κB, rac, MEK4/7, JNK, c-jun, MEK3/6, p38, PKR, TTP, or MK2 protein (e.g., specificity for a TNFα, TNFR1, TNFR2, TRADD, TRAF2, MEKK1/4, MEKK4/7, JNK, AP-1, ASK1, RIP, MEKK 3/6, MAPK, NIK, IKK, NF-κB, CD14, MyD88, IRAK, lipopolysaccharide binding protein (LBP), TRAF6, ras, raf, MEK1/2, ERK1/2, NIK, IKK, IκB, NF-κB, rac, MEK4/7, JNK, c-jun, MEK3/6, p38, PKR, TTP, or MK2 mRNA, e.g., specificity for any one of SEQ ID NOs: 13-49). Ribozymes are catalytic RNA molecules with ribonuclease activity that are capable of cleaving a single-stranded nucleic acid, such as an mRNA, to which they have a complementary region. Thus, ribozymes (e.g., hammerhead ribozymes (described in Haselhoff and Gerlach, Nature 334:585-591, 1988)) can be used to catalytically cleave mRNA transcripts to thereby inhibit translation of the protein encoded by the mRNA. A ribozyme having specificity for a TNFα, TNFR1, TNFR2, TRADD, TRAF2, MEKK1/4, MEKK4/7, JNK, AP-1, ASK1, RIP, MEKK 3/6, MAPK, NIK, IKK, NF-κB, CD14, MyD88, IRAK, lipopolysaccharide binding protein (LBP), TRAF6, ras, raf, MEK1/2, ERK1/2, NIK, IKK, IκB, NF-κB, rac, MEK4/7, JNK, c-jun, MEK3/6, p38, PKR, TTP, or MK2 mRNA can be designed based upon the nucleotide sequence of any of the TNFα, TNFR1, TNFR2, TRADD, TRAF2, MEKK1/4, MEKK4/7, JNK, AP-1, ASK1, RIP, MEKK 3/6, MAPK, NIK, IKK, NF-κB, CD14, MyD88, IRAK, lipopolysaccharide binding protein (LBP), TRAF6, ras, raf, MEK1/2, ERK1/2, NIK, IKK, IκB, NF-κB, rac, MEK4/7, JNK, c-jun, MEK3/6, p38, PKR, TTP, or MK2 mRNA sequences disclosed herein. For example, a derivative of a Tetrahymena L-19 IVS RNA can be constructed in which the nucleotide sequence of the active site is complementary to the nucleotide sequence to be cleaved in a TNFα, TNFR1, TNFR2, TRADD, TRAF2, MEKK1/4, MEKK4/7, JNK, AP-1, ASK1, RIP, MEKK 3/6, MAPK, NIK, IKK, NF-κB, CD14, MyD88, IRAK, lipopolysaccharide binding protein (LBP), TRAF6, ras, raf, MEK1/2, ERK1/2, NIK, IKK, IκB, NF-κB, rac, MEK4/7, JNK, c-jun, MEK3/6, p38, PKR, TTP, or MK2 mRNA (see, e.g., U.S. Pat. Nos. 4,987,071 and 5,116,742). Alternatively, a TNFα, TNFR1, TNFR2, TRADD, TRAF2, MEKK1/4, MEKK4/7, JNK, AP-1, ASK1, RIP, MEKK 3/6, MAPK, NIK, IKK, NF-κB, CD14, MyD88, IRAK, lipopolysaccharide binding protein (LBP), TRAF6, ras, raf, MEK1/2, ERK1/2, NIK, IKK, IκB, NF-κB, rac, MEK4/7, JNK, c-jun, MEK3/6, p38, PKR, TTP, or MK2 mRNA can be used to select a catalytic RNA having a specific ribonuclease activity from a pool of RNA molecules. See, e.g., Bartel et al., Science 261:1411-1418, 1993.

[0343] An inhibitory nucleic acid can also be a nucleic acid molecule that forms triple helical structures. For example, expression of a TNFα, TNFR1, TNFR2, TRADD, TRAF2, MEKK1/4, MEKK4/7, JNK, AP-1, ASK1, RIP, MEKK 3/6, MAPK, NIK, IKK, NF-κB, CD14, MyD88, IRAK, lipopolysaccharide binding protein (LBP), TRAF6, ras, raf, MEK1/2, ERK1/2, NIK, IKK, IκB, NF-κB, rac, MEK4/7, INK, c-jun, MEK3/6, p38, PKR, TTP, or MK2 polypeptide can be inhibited by targeting nucleotide sequences complementary to the regulatory region of the gene encoding the TNFα, TNFR1, TNFR2, TRADD, TRAF2, MEKK1/4, MEKK4/7, JNK, AP-1, ASK1, RIP, MEKK 3/6, MAPK, NIK, IKK, NF-κB, CD14, MyD88, IRAK, lipopolysaccharide binding protein (LBP), TRAF6, ras, raf, MEK1/2, ERK1/2, NIK, IKK, IκB, NF-κB, rac, MEK4/7, JNK, c-jun, MEK3/6, p38, PKR, TTP, or MK2 polypeptide (e.g., the promoter and/or enhancer, e.g., a sequence that is at least 1 kb, 2 kb, 3 kb, 4 kb, or 5 kb upstream of the transcription initiation start state) to form triple helical structures that prevent transcription of the gene in target cells. See generally Helene, Anticancer Drug Des. 6(6):569-84, 1991; Helene, Ann. N.Y. Acad. Sci. 660:27-36, 1992; and Maher, Bioassays 14(12):807-15, 1992.

[0344] In various embodiments, inhibitory nucleic acids can be modified at the base moiety, sugar moiety, or phosphate backbone to improve, e.g., the stability, hybridization, or solubility of the molecule. For example, the deoxyribose phosphate backbone of the nucleic acids can be modified to generate peptide nucleic acids (see, e.g., Hyrup et al., Bioorganic Medicinal Chem. 4(1):5-23, 1996). Peptide nucleic acids (PNAs) are nucleic acid mimics, e.g., DNA mimics, in which the deoxyribose phosphate backbone is replaced by a pseudopeptide backbone and only the four natural nucleobases are retained. The neutral backbone of PNAs allows for specific hybridization to DNA and RNA under conditions of low ionic strength. The synthesis of PNA oligomers can be performed using standard solid phase peptide synthesis protocols (see, e.g., Perry-O'Keefe et al., Proc. Natl. Acad. Sci. U.S.A. 93:14670-675, 1996). PNAs can be used as antisense or antigene agents for sequence-specific modulation of gene expression by, e.g., inducing transcription or translation arrest or inhibiting replication.

[0345] PNAs can be modified, e.g., to enhance their stability or cellular uptake, by attaching lipophilic or other helper groups to PNA, by the formation of PNA-DNA chimeras, or by the use of liposomes or other techniques of drug delivery known in the art. For example, PNA-DNA chimeras can be generated which may combine the advantageous properties of PNA and DNA. Such chimeras allow DNA recognition enzymes, e.g., RNAse H and DNA polymerases, to interact with the DNA portion while the PNA portion would provide high binding affinity and specificity. PNA-DNA chimeras can be linked using linkers of appropriate lengths selected in terms of base stacking, number of bonds between the nucleobases, and orientation.

[0346] The synthesis of PNA-DNA chimeras can be performed as described in Finn et al., Nucleic Acids Res. 24:3357-63, 1996. For example, a DNA chain can be synthesized on a solid support using standard phosphoramidite coupling chemistry and modified nucleoside analogs. Compounds such as 5′-(4-methoxytrityl)amino-5′-deoxy-thymidine phosphoramidite can be used as a link between the PNA and the 5′ end of DNA (Mag et al., Nucleic Acids Res. 17:5973-88, 1989). PNA monomers are then coupled in a stepwise manner to produce a chimeric molecule with a 5′ PNA segment and a 3′ DNA segment (Finn et al., Nucleic Acids Res. 24:3357-63, 1996). Alternatively, chimeric molecules can be synthesized with a 5′ DNA segment and a 3′ PNA segment (Peterser et al., Bioorganic Med. Chem. Lett. 5:1119-11124, 1975).

[0347] In some embodiments, the inhibitory nucleic acids can include other appended groups such as peptides, or agents facilitating transport across the cell membrane (see, Letsinger et al., Proc. Natl. Acad. Sci. U.S.A. 86:6553-6556, 1989; Lemaitre et al., Proc. Natl. Acad. Sci. U.S.A. 84:648-652, 1989; and WO 88/09810). In addition, the inhibitory nucleic acids can be modified with hybridization-triggered cleavage agents (see, e.g., Krol et al., Bio/Techniques 6:958-976, 1988) or intercalating agents (see, e.g., Zon, Pharm. Res., 5:539-549, 1988). To this end, the oligonucleotide may be conjugated to another molecule, e.g., a peptide, hybridization triggered cross-linking agent, transport agent, hybridization-triggered cleavage agent, etc.

[0348] Another means by which expression of a TNFα, TNFR1, TNFR2, TRADD, TRAF2, MEKK1/4, MEKK4/7, JNK, AP-1, ASK1, RIP, MEKK 3/6, MAPK, NIK, IKK, NF-κB, CD14, MyD88, IRAK, lipopolysaccharide binding protein (LBP), TRAF6, ras, raf, MEK1/2, ERK1/2, NIK, IKK, IκB, NF-κB, rac, MEK4/7, JNK, c-jun, MEK3/6, p38, PKR, TTP, or MK2 mRNA can be decreased in a mammalian cell is by RNA interference (RNAi). RNAi is a process in which mRNA is degraded in host cells. To inhibit an mRNA, double-stranded RNA (dsRNA) corresponding to a portion of the gene to be silenced (e.g., a gene encoding a TNFα, TNFR1, TNFR2, TRADD, TRAF2, MEKK1/4, MEKK4/7, JNK, AP-1, ASK1, RIP, MEKK 3/6, MAPK, NIK, IKK, NF-κB, CD14, MyD88, IRAK, lipopolysaccharide binding protein (LBP), TRAF6, ras, raf, MEK1/2, ERK1/2, NIK, IKK, IκB, NF-κB, rac, MEK4/7, JNK, c-jun, MEK3/6, p38, PKR, TTP, or MK2 polypeptide) is introduced into a mammalian cell. The dsRNA is digested into 21-23 nucleotide-long duplexes called short interfering RNAs (or siRNAs), which bind to a nuclease complex to form what is known as the RNA-induced silencing complex (or RISC). The RISC targets the homologous transcript by base pairing interactions between one of the siRNA strands and the endogenous mRNA. It then cleaves the mRNA about 12 nucleotides from the 3′ terminus of the siRNA (see Sharp et al., Genes Dev. 15:485-490, 2001, and Hammond et al., Nature Rev. Gen. 2:110-119, 2001).

[0349] RNA-mediated gene silencing can be induced in a mammalian cell in many ways, e.g., by enforcing endogenous expression of RNA hairpins (see, Paddison et al., Proc. Natl. Acad. Sci. U.S.A. 99:1443-1448, 2002) or, as noted above, by transfection of small (21-23 nt) dsRNA (reviewed in Caplen, Trends Biotech. 20:49-51, 2002). Methods for modulating gene expression with RNAi are described, e.g., in U.S. Pat. No. 6,506,559 and US 2003/0056235, which are hereby incorporated by reference.

[0350] Standard molecular biology techniques can be used to generate siRNAs. Short interfering RNAs can be chemically synthesized, recombinantly produced, e.g., by expressing RNA from a template DNA, such as a plasmid, or obtained from commercial vendors, such as Dharmacon. The RNA used to mediate RNAi can include synthetic or modified nucleotides, such as phosphorothioate nucleotides. Methods of transfecting cells with siRNA or with plasmids engineered to make siRNA are routine in the art.

[0351] The siRNA molecules used to decrease expression of a TNFα, TNFR1, TNFR2, TRADD, TRAF2, MEKK1/4, MEKK4/7, JNK, AP-1, ASK1, RIP, MEKK 3/6, MAPK, NIK, IKK, NF-κB, CD14, MyD88, IRAK, lipopolysaccharide binding protein (LBP), TRAF6, ras, raf, MEK1/2, ERK1/2, NIK, IKK, IκB, NF-κB, rac, MEK4/7, JNK, c-jun, MEK3/6, p38, PKR, TTP, or MK2 mRNA can vary in a number of ways. For example, they can include a 3′ hydroxyl group and strands of 21, 22, or 23 consecutive nucleotides. They can be blunt ended or include an overhanging end at either the 3′ end, the 5′ end, or both ends. For example, at least one strand of the RNA molecule can have a 3′ overhang from about 1 to about 6 nucleotides (e.g., 1-5, 1-3, 2-4, or 3-5 nucleotides (whether pyrimidine or purine nucleotides) in length. Where both strands include an overhang, the length of the overhangs may be the same or different for each strand.

[0352] To further enhance the stability of the RNA duplexes, the 3′ overhangs can be stabilized against degradation (by, e.g., including purine nucleotides, such as adenosine or guanosine nucleotides or replacing pyrimidine nucleotides by modified analogues (e.g., substitution of uridine 2-nucleotide 3′ overhangs by 2′-deoxythymidine is tolerated and does not affect the efficiency of RNAi). Any siRNA can be used in the methods of decreasing a TNFα, TNFR1, TNFR2, TRADD, TRAF2, MEKK1/4, MEKK4/7, INK, AP-1, ASK1, RIP, MEKK 3/6, MAPK, NIK, IKK, NF-κB, CD14, MyD88, IRAK, lipopolysaccharide binding protein (LBP), TRAF6, ras, raf, MEK1/2, ERK1/2, NIK, IKK, IκB, NF-κB, rac, MEK4/7, JNK, c-jun, MEK3/6, p38, PKR, TTP, or MK2 mRNA, provided it has sufficient homology to the target of interest (e.g., a sequence present in any one of SEQ ID NOs: 13-49, e.g., a target sequence encompassing the translation start site or the first exon of the mRNA). There is no upper limit on the length of the siRNA that can be used (e.g., the siRNA can range from about 21 base pairs of the gene to the full length of the gene or more (e.g., about 20 to about 30 base pairs, about 50 to about 60 base pairs, about 60 to about 70 base pairs, about 70 to about 80 base pairs, about 80 to about 90 base pairs, or about 90 to about 100 base pairs).

[0353] Exemplary TNFα inhibitors that are inhibitory nucleic acids targeting TNFα include, e.g., antisense DNA (e.g., Myers et al., J Pharmacol Exp Ther. 304(1):411-424, 2003; Wasmuth et al., Invest. Opthalmol. Vis. Sci, 2003; Dong et al., J. Orthop. Res. 26(8):1114-1120, 2008; U.S. Patent Application Serial Nos. 2003/0083275, 2003/0022848, and 2004/0770970; ISIS 104838; U.S. Pat. Nos. 6,180,403, 6,080,580, and 6,228,642; Kobzik et al., Inhibition of TNF Synthesis by Antisense Oligonucleotides, in Manual of Antisense Methodology, Kluwer Academic Publishers, Vol. 4, pp. 107-123, 1999; Taylor et al., Antisense Nucleic Acid Drug Develop. 8(3):199-205, 1998; Mayne et al., Stroke 32:240-248, 2001; Mochizuki et al., J. Controlled Release 151(2):155-161, 2011; Dong et al., J. Orthopaedic Res. 26(8):1114-1120, 2008; Dong et al., Pharm. Res. 28(6):1349-1356, 2011; and Pampfer et al., Biol. Reproduction 52 (6):1316-1326, 1995), antisense RNA, short interfering RNA (siRNA) (e.g., Taishi et al., Brain Research 1156:125-132, 2007; Presumey et al., Eur. J. Pharm. Biopharm. 82(3):457-467, 2012; Laroui et al., J. Controlled Release 186:41-53, 2014; D'Amore et al., Int. J. Immunopathology Pharmacol. 21:1045-1047, 2008; Choi et al., J. Dermatol. Sci. 52:87-97, 2008; Qin et al., Artificial Organs 35:706-714, 2011; McCarthy et al., J. Controlled Release 168: 28-34, 2013; Khoury et al., Current Opin. Mol. Therapeutics 9(5):483-489, 2007; Lu et al., RNA Interference Technology From Basic Science to Drug Development 303, 2005; Xie et al., PharmaGenomics 4(6):28-34, 2004; Aldawsari et al., Current Pharmaceutical Design 21(31):4594-4605, 2015; Zheng et al., Arch. Med. Sci. 11:1296-1302, 2015; Peng et al., Chinese J. Surgery 47(5):377-380, 2009; Aldayel et al., Molecular Therapy. Nucleic Acids 5(7):e340, 2016; Bai et al., Current Drug Targets 16:1531-1539, 2015; U.S. Patent Application Publications Nos. 2008/0097091, 2009/0306356, and 2005/0227935; and WO 14/168264), short hairpin RNA (shRNA) (e.g., Jakobsen et al., Mol. Ther. 17(10): 1743-1753, 2009; Ogawa et al., PLoS One 9(3): e92073, 2014; Ding et al., Bone Joint 94-6(Suppl. 11):44, 2014; and Hernandez-Alejandro et al., J. Surgical Res. 176(2):614-620, 2012), and microRNAs (see, e.g., WO 15/26249). In some embodiments, the inhibitory nucleic acid blocks pre-mRNA splicing of TNFα (e.g., Chiu et al., Mol. Pharmacol. 71(6): 1640-1645, 2007).

[0354] In some embodiments, the inhibitory nucleic acid, e.g., an aptamer (e.g., Orava et al., ACS Chem Biol. 2013; 8(1): 170-178, 2013), can block the binding of a TNFα protein with its receptor (TNFR1 and/or TNFR2).

[0355] In some embodiments, the inhibitory nucleic acid can down-regulate the expression of a TNFα-induced downstream mediator (e.g., TRADD, TRAF2, MEKK1/4, MEKK4/7, JNK, AP-1, ASK1, RIP, MEKK 3/6, MAPK, NIK, IKK, NF-κB, p38, JNK, IκB-α, or CCL2). Further teachings of downstream TNFα-induced mediators can be found in, e.g., Schwamborn et al., BMC Genomics 4:46, 2003; and Zhou et al., Oncogene 22: 2034-2044, 2003, incorporated by reference herein. Additional aspects of inhibitory nucleic acids are described in Aagaard et al., Adv. Drug Delivery Rev. 59(2):75-86, 2007, and Burnett et al., Biotechnol. J. 6(9):1130-1146, 2011.

[0356] In certain embodiments, a therapeutically effective amount of an inhibitory nucleic acid targeting a nucleic acid encoding a TNFα, TNFR1, TNFR2, TRADD, TRAF2, MEKK1/4, MEKK4/7, JNK, AP-1, ASK1, RIP, MEKK 3/6, MAPK, NIK, IKK, NF-κB, CD14, MyD88, IRAK, lipopolysaccharide binding protein (LBP), TRAF6, ras, raf, MEK1/2, ERK1/2, NIK, IKK, IκB, NF-κB, rac, MEK4/7, JNK, c-jun, MEK3/6, p38, PKR, TTP, or MK2 protein can be administered to a subject (e.g., a human subject) in need thereof.

[0357] In some embodiments, the inhibitory nucleic acid can be about 10 nucleotides to about 40 nucleotides (e.g., about 10 to about 30 nucleotides, about 10 to about 25 nucleotides, about 10 to about 20 nucleotides, about 10 to about 15 nucleotides, 10 nucleotides, 11 nucleotides, 12 nucleotides, 13 nucleotides, 14 nucleotides, 15 nucleotides, 16 nucleotides, 17 nucleotides, 18 nucleotides, 19 nucleotides, 20 nucleotides, 21 nucleotides, 22 nucleotides, 23 nucleotides, 24 nucleotides, 25 nucleotides, 26 nucleotides, 27 nucleotides, 28 nucleotides, 29 nucleotides, 30 nucleotides, 31 nucleotides, 32 nucleotides, 33 nucleotides, 34 nucleotides, 35 nucleotides, 36 nucleotides, 37 nucleotides, 38 nucleotides, 39 nucleotides, or 40 nucleotides) in length. One skilled in the art will appreciate that inhibitory nucleic acids may comprise at least one modified nucleic acid at either the 5′ or 3′end of DNA or RNA.

[0358] As is known in the art, the term “thermal melting point (Tm)” refers to the temperature, under defined ionic strength, pH, and inhibitory nucleic acid concentration, at which 50% of the inhibitory nucleic acids complementary to the target sequence hybridize to the target sequence at equilibrium. In some embodiments, an inhibitory nucleic acid can bind specifically to a target nucleic acid under stingent conditions, e.g., those in which the salt concentration is at least about 0.01 to 1.0 M Na ion concentration (or other salts) at pH 7.0 to 8.3 and the temperature is at least about 30° C. for short oligonucleotides (e.g., 10 to 50 nucleotide). Stringent conditions can also be achieved with the addition of destabilizing agents such as formamide.

[0359] In some embodiments of any of the inhibitory nucleic acids described herein, the inhibitory nucleic acid binds to a target nucleic acid (e.g., a nucleic acid encoding any one of TNFα, TNFR1, TNFR2, TRADD, TRAF2, MEKK1/4, MEKK4/7, JNK, AP-1, ASK1, RIP, MEKK 3/6, MAPK, NIK, IKK, NF-κB, CD14, MyD88, IRAK, lipopolysaccharide binding protein (LBP), TRAF6, ras, raf, MEK1/2, ERK1/2, NIK, IKK, IκB, NF-κB, rac, MEK4/7, JNK, c-jun, MEK3/6, p38, PKR, TTP, or MK2) with a Tm of greater than 20° C., greater than 22° C., greater than 24° C., greater than 26° C., greater than 28° C., greater than 30° C., greater than 32° C., greater than 34° C., greater than 36° C., greater than 38° C., greater than 40° C., greater than 42° C., greater than 44° C., greater than 46° C., greater than 48° C., greater than 50° C., greater than 52° C., greater than 54° C., greater than 56° C., greater than 58° C., greater than 60° C., greater than 62° C., greater than 64° C., greater than 66° C., greater than 68° C., greater than 70° C., greater than 72° C., greater than 74° C., greater than 76° C., greater than 78° C., or greater than 80° C., e.g., as measured in phosphate buffered saline using a UV spectrophotometer.

[0360] In some embodiments of any of the inhibitor nucleic acids described herein, the inhibitory nucleic acid binds to a target nucleic acid (e.g., a nucleic acid encoding any one of TNFα, TNFR1, TNFR2, TRADD, TRAF2, MEKK1/4, MEKK4/7, JNK, AP-1, ASK1, RIP, MEKK 3/6, MAPK, NIK, IKK, NF-κB, CD14, MyD88, IRAK, lipopolysaccharide binding protein (LBP), TRAF6, ras, raf, MEK1/2, ERK1/2, NIK, IKK, IκB, NF-κB, rac, MEK4/7, JNK, c-jun, MEK3/6, p38, PKR, TTP, or MK2) with a Tm of about 20° C. to about 80° C., about 78° C., about 76° C., about 74° C., about 72° C., about 70° C., about 68° C., about 66° C., about 64° C., about 62° C., about 60° C., about 58° C., about 56° C., about 54° C., about 52° C., about 50° C., about 48° C., about 46° C., about 44° C., about 42° C., about 40° C., about 38° C., about 36° C., about 34° C., about 32° C., about 30° C., about 28° C., about 26° C., about 24° C., or about 22° C. (inclusive); about 22° C. to about 80° C., about 78° C., about 76° C., about 74° C., about 72° C., about 70° C., about 68° C., about 66° C., about 64° C., about 62° C., about 60° C., about 58° C., about 56° C., about 54° C., about 52° C., about 50° C., about 48° C., about 46° C., about 44° C., about 42° C., about 40° C., about 38° C., about 36° C., about 34° C., about 32° C., about 30° C., about 28° C., about 26° C., or about 24° C. (inclusive); about 24° C. to about 80° C., about 78° C., about 76° C., about 74° C., about 72° C., about 70° C., about 68° C., about 66° C., about 64° C., about 62° C., about 60° C., about 58° C., about 56° C., about 54° C., about 52° C., about 50° C., about 48° C., about 46° C., about 44° C., about 42° C., about 40° C., about 38° C., about 36° C., about 34° C., about 32° C., about 30° C., about 28° C., or about 26° C. (inclusive); about 26° C. to about 80° C., about 78° C., about 76° C., about 74° C., about 72° C., about 70° C., about 68° C., about 66° C., about 64° C., about 62° C., about 60° C., about 58° C., about 56° C., about 54° C., about 52° C., about 50° C., about 48° C., about 46° C., about 44° C., about 42° C., about 40° C., about 38° C., about 36° C., about 34° C., about 32° C., about 30° C., or about 28° C. (inclusive); about 28° C. to about 80° C., about 78° C., about 76° C., about 74° C., about 72° C., about 70° C., about 68° C., about 66° C., about 64° C., about 62° C., about 60° C., about 58° C., about 56° C., about 54° C., about 52° C., about 50° C., about 48° C., about 46° C., about 44° C., about 42° C., about 40° C., about 38° C., about 36° C., about 34° C., about 32° C., or about 30° C. (inclusive); about 30° C. to about 80° C., about 78° C., about 76° C., about 74° C., about 72° C., about 70° C., about 68° C., about 66° C., about 64° C., about 62° C., about 60° C., about 58° C., about 56° C., about 54° C., about 52° C., about 50° C., about 48° C., about 46° C., about 44° C., about 42° C., about 40° C., about 38° C., about 36° C., about 34° C., or about 32° C. (inclusive); about 32° C. to about 80° C., about 78° C., about 76° C., about 74° C., about 72° C., about 70° C., about 68° C., about 66° C., about 64° C., about 62° C., about 60° C., about 58° C., about 56° C., about 54° C., about 52° C., about 50° C., about 48° C., about 46° C., about 44° C., about 42° C., about 40° C., about 38° C., about 36° C., or about 34° C. (inclusive); about 34° C. to about 80° C., about 78° C., about 76° C., about 74° C., about 72° C., about 70° C., about 68° C., about 66° C., about 64° C., about 62° C., about 60° C., about 58° C., about 56° C., about 54° C., about 52° C., about 50° C., about 48° C., about 46° C., about 44° C., about 42° C., about 40° C., about 38° C., or about 36° C. (inclusive); about 36° C. to about 80° C., about 78° C., about 76° C., about 74° C., about 72° C., about 70° C., about 68° C., about 66° C., about 64° C., about 62° C., about 60° C., about 58° C., about 56° C., about 54° C., about 52° C., about 50° C., about 48° C., about 46° C., about 44° C., about 42° C., about 40° C., or about 38° C. (inclusive); about 38° C. to about 80° C., about 78° C., about 76° C., about 74° C., about 72° C., about 70° C., about 68° C., about 66° C., about 64° C., about 62° C., about 60° C., about 58° C., about 56° C., about 54° C., about 52° C., about 50° C., about 48° C., about 46° C., about 44° C., about 42° C., or about 40° C. (inclusive); about 40° C. to about 80° C., about 78° C., about 76° C., about 74° C., about 72° C., about 70° C., about 68° C., about 66° C., about 64° C., about 62° C., about 60° C., about 58° C., about 56° C., about 54° C., about 52° C., about 50° C., about 48° C., about 46° C., about 44° C., or about 42° C. (inclusive); about 42° C. to about 80° C., about 78° C., about 76° C., about 74° C., about 72° C., about 70° C., about 68° C., about 66° C., about 64° C., about 62° C., about 60° C., about 58° C., about 56° C., about 54° C., about 52° C., about 50° C., about 48° C., about 46° C., or about 44° C. (inclusive); about 44° C. to about 80° C., about 78° C., about 76° C., about 74° C., about 72° C., about 70° C., about 68° C., about 66° C., about 64° C., about 62° C., about 60° C., about 58° C., about 56° C., about 54° C., about 52° C., about 50° C., about 48° C., or about 46° C. (inclusive); about 46° C. to about 80° C., about 78° C., about 76° C., about 74° C., about 72° C., about 70° C., about 68° C., about 66° C., about 64° C., about 62° C., about 60° C., about 58° C., about 56° C., about 54° C., about 52° C., about 50° C., or about 48° C. (inclusive); about 48° C. to about 80° C., about 78° C., about 76° C., about 74° C., about 72° C., about 70° C., about 68° C., about 66° C., about 64° C., about 62° C., about 60° C., about 58° C., about 56° C., about 54° C., about 52° C., or about 50° C. (inclusive); about 50° C. to about 80° C., about 78° C., about 76° C., about 74° C., about 72° C., about 70° C., about 68° C., about 66° C., about 64° C., about 62° C., about 60° C., about 58° C., about 56° C., about 54° C., or about 52° C. (inclusive); about 52° C. to about 80° C., about 78° C., about 76° C., about 74° C., about 72° C., about 70° C., about 68° C., about 66° C., about 64° C., about 62° C., about 60° C., about 58° C., about 56° C., or about 54° C. (inclusive); about 54° C. to about 80° C., about 78° C., about 76° C., about 74° C., about 72° C., about 70° C., about 68° C., about 66° C., about 64° C., about 62° C., about 60° C., about 58° C., or about 56° C. (inclusive); about 56° C. to about 80° C., about 78° C., about 76° C., about 74° C., about 72° C., about 70° C., about 68° C., about 66° C., about 64° C., about 62° C., about 60° C., or about 58° C. (inclusive); about 58° C. to about 80° C., about 78° C., about 76° C., about 74° C., about 72° C., about 70° C., about 68° C., about 66° C., about 64° C., about 62° C., or about 60° C. (inclusive); about 60° C. to about 80° C., about 78° C., about 76° C., about 74° C., about 72° C., about 70° C., about 68° C., about 66° C., about 64° C., or about 62° C. (inclusive); about 62° C. to about 80° C., about 78° C., about 76° C., about 74° C., about 72° C., about 70° C., about 68° C., about 66° C., or about 64° C. (inclusive); about 64° C. to about 80° C., about 78° C., about 76° C., about 74° C., about 72° C., about 70° C., about 68° C., or about 66° C. (inclusive); about 66° C. to about 80° C., about 78° C., about 76° C., about 74° C., about 72° C., about 70° C., or about 68° C. (inclusive); about 68° C. to about 80° C., about 78° C., about 76° C., about 74° C., about 72° C., or about 70° C. (inclusive); about 70° C. to about 80° C., about 78° C., about 76° C., about 74° C., or about 72° C. (inclusive); about 72° C. to about 80° C., about 78° C., about 76° C., or about 74° C. (inclusive); about 74° C. to about 80° C., about 78° C., or about 76° C. (inclusive); about 76° C. to about 80° C. or about 78° C. (inclusive); or about 78° C. to about 80° C. (inclusive),

[0361] In some embodiments, the inhibitory nucleic acid can be formulated in a nanoparticle (e.g., a nanoparticle including one or more synthetic polymers, e.g., Patil et al., Pharmaceutical Nanotechnol. 367:195-203, 2009; Yang et al., ACS Appl. Mater. Interfaces, doi: 10.1021/acsami.6b16556, 2017; Perepelyuk et al., Mol. Ther. Nucleic Acids 6:259-268, 2017). In some embodiments, the nanoparticle can be a mucoadhesive particle (e.g., nanoparticles having a positively-charged exterior surface) (Andersen et al., Methods Mol. Biol. 555:77-86, 2009). In some embodiments, the nanoparticle can have a neutrally-charged exterior surface.

[0362] In some embodiments, the inhibitory nucleic acid can be formulated, e.g., as a liposome (Buyens et al., J. Control Release 158(3): 362-370, 2012; Scarabel et al., Expert Opin. Drug Deliv. 17:1-14, 2017), a micelle (e.g., a mixed micelle) (Tangsangasaksri et al., BioMacromolecules 17:246-255, 2016; Wu et al., Nanotechnology, doi: 10.1088/1361-6528/aa6519, 2017), a microemulsion (WO 11/004395), a nanoemulsion, or a solid lipid nanoparticle (Sahay et al., Nature Biotechnol. 31:653-658, 2013; and Lin et al., Nanomedicine 9(1):105-120, 2014). Additional exemplary structural features of inhibitory nucleic acids and formulations of inhibitory nucleic acids are described in US 2016/0090598.

[0363] In some embodiments, a pharmaceutical composition can include a sterile saline solution and one or more inhibitory nucleic acid (e.g., any of the inhibitory nucleic acids described herein). In some examples, a pharmaceutical composition consists of a sterile saline solution and one or more inhibitory nucleic acid (e.g., any of the inhibitory nucleic acids described herein). In certain embodiments, the sterile saline is a pharmaceutical grade saline. In certain embodiments, a pharmaceutical composition can include one or more inhibitory nucleic acid (e.g., any of the inhibitory nucleic acids described herein) and sterile water. In certain embodiments, a pharmaceutical composition consists of one or more inhibitory nucleic acid (e.g., any of the inhibitory nucleic acids described herein) and sterile water. In certain embodiments, a pharmaceutical composition includes one or more inhibitory nucleic acid (e.g., any of the inhibitory nucleic acids described herein) and phosphate-buffered saline (PBS). In certain embodiments, a pharmaceutical composition consists of one or more inhibitory nucleic acids (e.g., any of the inhibitory nucleic acids described herein) and sterile phosphate-buffered saline (PBS). In some examples, the sterile saline is a pharmaceutical grade PBS.

[0364] In certain embodiments, one or more inhibitory nucleic acids (e.g., any of the inhibitory nucleic acids described herein) may be admixed with pharmaceutically acceptable active and/or inert substances for the preparation of pharmaceutical compositions or formulations. Compositions and methods for the formulation of pharmaceutical compositions depend on a number of criteria, including, but not limited to, route of administration, extent of disease, or dose to be administered.

[0365] Pharmaceutical compositions including one or more inhibitory nucleic acids encompass any pharmaceutically acceptable salts, esters, or salts of such esters. Non-limiting examples of pharmaceutical compositions include pharmaceutically acceptable salts of inhibitory nucleic acids. Suitable pharmaceutically acceptable salts include, but are not limited to, sodium and potassium salts.

[0366] Also provided herein are prodrugs that can include additional nucleosides at one or both ends of an inhibitory nucleic acid which are cleaved by endogenous nucleases within the body, to form the active inhibitory nucleic acid.

[0367] Lipid moieties can be used to formulate an inhibitory nucleic acid. In certain such methods, the inhibitory nucleic acid is introduced into preformed liposomes or lipoplexes made of mixtures of cationic lipids and neutral lipids. In certain methods, inhibitory nucleic acid complexes with mono- or poly-cationic lipids are formed without the presence of a neutral lipid. In certain embodiments, a lipid moiety is selected to increase distribution of an inhibitory nucleic acid to a particular cell or tissue in a mammal. In some examples, a lipid moiety is selected to increase distribution of an inhibitory nucleic acid to fat tissue in a mammal. In certain embodiments, a lipid moiety is selected to increase distribution of an inhibitory nucleic acid to muscle tissue.

[0368] In certain embodiments, pharmaceutical compositions provided herein comprise one or more inhibitory nucleic acid and one or more excipients. In certain such embodiments, excipients are selected from water, salt solutions, alcohol, polyethylene glycols, gelatin, lactose, amylase, magnesium stearate, talc, silicic acid, viscous paraffin, hydroxymethylcellulose and polyvinylpyrrolidone.

[0369] In some examples, a pharmaceutical composition provided herein includes liposomes and emulsions. Liposomes and emulsions can be used to formulate hydrophobic compounds. In some examples, certain organic solvents such as dimethylsulfoxide are used.

[0370] In some examples, a pharmaceutical composition provided herein includes one or more tissue-specific delivery molecules designed to deliver one or more inhibitory nucleic acids to specific tissues or cell types in a mammal. For example, a pharmaceutical composition can include liposomes coated with a tissue-specific antibody.

[0371] In some embodiments, a pharmaceutical composition provided herein can include a co-solvent system. Examples of such co-solvent systems include benzyl alcohol, a nonpolar surfactant, a water-miscible organic polymer, and an aqueous phase. A non-limiting example of such a co-solvent system is the VPD co-solvent system, which is a solution of absolute ethanol comprising 3% w/v benzyl alcohol, 8% w/v of the nonpolar surfactant Polysorbate 80™ and 65% w/v polyethylene glycol 300. As can be appreciated, other surfactants may be used instead of Polysorbate 80™; the fraction size of polyethylene glycol may be varied; other biocompatible polymers may replace polyethylene glycol, e.g., polyvinyl pyrrolidone; and other sugars or polysaccharides may substitute for dextrose.

[0372] In some examples, a pharmaceutical composition can be formulated for oral administration. In some examples, pharmaceutical compositions are formulated for buccal administration.

[0373] In some examples, a pharmaceutical composition is formulated for administration by injection (e.g., intravenous, subcutaneous, intramuscular, etc.). In some of these embodiments, a pharmaceutical composition includes a carrier and is formulated in aqueous solution, such as water or physiologically compatible buffers such as Hanks's solution, Ringer's solution, or physiological saline buffer. In some examples, other ingredients are included (e.g., ingredients that aid in solubility or serve as preservatives). In some examples, injectable suspensions are prepared using appropriate liquid carriers, suspending agents, and the like. Some pharmaceutical compositions for injection are formulated in unit dosage form, e.g., in ampoules or in multi-dose containers. Some pharmaceutical compositions for injection are suspensions, solutions, or emulsions in oily or aqueous vehicles, and may contain formulatory agents such as suspending, stabilizing, and/or dispersing agents. Solvents suitable for use in pharmaceutical compositions for injection include, but are not limited to, lipophilic solvents and fatty oils, such as sesame oil, synthetic fatty acid esters, such as ethyl oleate or triglycerides, and liposomes.

### Antibodies

[0374] In some embodiments, the TNFα inhibitor is an antibody or an antigen-binding fragment thereof (e.g., a Fab or a scFv). In some embodiments, an antibody or antigen-binding fragment described herein binds specifically to any one of TNFα, TNFR1, or TNFR2. In some embodiments, an antibody or antigen-binding fragment of an antibody described herein can bind specifically to TNFα. In some embodiments, an antibody or antigen-binding fragment of an antibody described herein can bind specifically to an TNFα receptor (TNFR1 or TNFR2).

[0375] In some embodiments, the antibody can be a humanized antibody, a chimeric antibody, a multivalent antibody, or a fragment thereof. In some embodiments, an antibody can be a scFv-Fc, a VHH domain, a VNAR domain, a (scFv)2, a minibody, or a BiTE. In some embodiments, an antibody can be a DVD-Ig, and a dual-affinity re-targeting antibody (DART), a triomab, kih IgG with a common LC, a crossmab, an ortho-Fab IgG, a 2-in-1-IgG, IgG-ScFv, scFv2-Fc, a bi-nanobody, tanden antibody, a DART-Fc, a scFv-HAS-scFv, DNL-Fab3, DAF (two-in-one or four-in-one), DutaMab, DT-IgG, knobs-in-holes common LC, knobs-in-holes assembly, charge pair antibody, Fab-arm exchange antibody, SEEDbody, Triomab, LUZ-Y, Fcab, kλ-body, orthogonal Fab, DVD-IgG, IgG(H)-scFv, scFv-(H)IgG, IgG(L)-scFv, scFv-(L)-IgG, IgG (L,H)-Fc, IgG(H)-V, V(H)-IgG, IgG(L)-V, V(L)-IgG, KIH IgG-scFab, 2scFv-IgG, IgG-2scFv, scFv4-Ig, Zybody, DVI-IgG, nanobody, nanobody-HSA, a diabody, a TandAb, scDiabody, scDiabody-CH3, Diabody-CH3, Triple Body, miniantibody, minibody, TriBi minibody, scFv-CH3 KIH, Fab-scFv, scFv-CH-CL-scFv, F(ab′)2-scFV2, scFv-KIH, Fab-scFv-Fc, tetravalent HCAb, scDiabody-Fc, diabody-Fc, tandem scFv-Fc, intrabody, dock and lock bispecific antibody, ImmTAC, HSAbody, scDiabody-HAS, tandem scFv, IgG-IgG, Cov-X-Body, and seFv1-PEG-seFv2.

[0376] Non-limiting examples of an antigen-binding fragment of an antibody include an Fv fragment, a Fab fragment, a F(ab′)2 fragment, and a Fab′ fragment. Additional examples of an antigen-binding fragment of an antibody is an antigen-binding fragment of an IgG (e.g., an antigen-binding fragment of IgG1, IgG2, IgG3, or IgG4) (e.g., an antigen-binding fragment of a human or humanized IgG, e.g., human or humanized IgG1, IgG2, IgG3, or IgG4); an antigen-binding fragment of an IgA (e.g., an antigen-binding fragment of IgA1 or IgA2) (e.g., an antigen-binding fragment of a human or humanized IgA, e.g., a human or humanized IgA1 or IgA2); an antigen-binding fragment of an IgD (e.g., an antigen-binding fragment of a human or humanized IgD); an antigen-binding fragment of an IgE (e.g., an antigen-binding fragment of a human or humanized IgE); or an antigen-binding fragment of an IgM (e.g., an antigen-binding fragment of a human or humanized IgM).

[0377] Non-limiting examples of TNF inhibitors that are antibodies that specifically bind to TNFα are described in Elliott et al., Lancet 1994; 344: 1125-1127, 1994; Rankin et al., Br. J. Rheumatol. 2:334-342, 1995; Butler et al., Eur. Cytokine Network 6(4):225-230, 1994; Lorenz et al., J. Immunol. 156(4):1646-1653, 1996; Hinshaw et al., Circulatory Shock 30(3):279-292, 1990; Wanner et al., Shock 11(6):391-395, 1999; Bongartz et al., JAMA 295(19):2275-2285, 2006; Knight et al., Molecular Immunol. 30(16):1443-1453, 1993; Feldman, Nature Reviews Immunol. 2(5):364-371, 2002; Taylor et al., Nature Reviews Rheumatol. 5(10):578-582, 2009; Garces et al., Annals Rheumatic Dis. 72(12):1947-1955, 2013; Palladino et al., Nature Rev. Drug Discovery 2(9):736-746, 2003; Sandborn et al., Inflammatory Bowel Diseases 5(2):119-133, 1999; Atzeni et al., Autoimmunity Reviews 12(7):703-708, 2013; Maini et al., Immunol. Rev. 144(1):195-223, 1995; Ordas et al., Clin. Pharmacol. Therapeutics 91(4):635-646, 2012; Cohen et al., Canadian J Gastroenterol. Hepatol. 15(6):376-384, 2001; Feldmann et al., Ann. Rev. Immunol. 19(1):163-196, 2001; Ben-Horin et al., Autoimmunity Rev. 13(1):24-30, 2014; and U.S. Pat. Nos. 6,090,382; 6,258,562; and 6,509,015).

[0378] In certain embodiments, the TNFα inhibitor can include or is infliximab (Remicade™), CDP571, CDP 870, golimumab (Golimumab™), adalimumab (Humira™), or certolizumab pegol (Cimzia™). In certain embodiments, the TNFα inhibitor can be a TNFα inhibitor biosimilar. Examples of approved and late-phase TNFα inhibitor biosimilars include, but are not limited to, infliximab biosimilars such as Remsima™ and Inflectra® (CT-P13) from Celltrion/Pfizer, GS071 from Aprogen, Flixabi™ (SB2) from Samsung Bioepis, PF-06438179 from Pfizer/Sandoz, NI-071 from Nichi-Iko Pharmaceutical Co., and ABP 710 from Amgen; adalimumab biosimilars such as Exemptia™ (ZRC3197) from Zydus Cadila, India, Solymbic® and Amgevita® (ABP 501) from Amgen, Imraldi (SB5) from Samsung Bioepis, GP-2017 from Sandoz, Switzerland, ONS-3010 from Oncobiologics/Viropro, U.S.A., M923 from Momenta Pharmaceuticals/Baxalta (Baxter spinoff USA), PF-06410293 from Pfizer, BMO-2 or MYL-1401-A from Biocon/Mylan, CHS-1420 from Coherus, FKB327 from Fujifilm/Kyowa Hakko Kirin (Fujifilm Kyowa Kirin Biologics), Cyltezo (BI 695501) from Boehringer Ingelheim, CT-P17 from Celltrion, BAX 923 from Baxalta (now a part of Shire), MSB11022 from Fresenius Kabi (bought from Merck kGaA (Merck Group) in 2017), LBAL from LG Life Sciences/Mochida Pharmaceutical, South Korea/Japan, PBP1502 from Prestige Biopharma, Adfrar from Torrent Pharmaceuticals, India, a biosimilar of adalimumab in development by Adello Biologics, a biosimilar of adalimumab in development by AET Biotech/BioXpress Therapeutics, Germany/Switzerland, a biosimilar of adalimumab from mAbxience, Spain, a biosimilar of adalimumab in development by PlantForm, Canada; and etanercept biosimilars such as Erelzi™ from Sandoz/Novartis, Brenzys™ (SB4) from Samsung Bioepis, GP2015 from Sandoz, TuNEX® from Mycenax, LBEC0101 from LG Life, and CHS-0214 from Coherus.

[0379] In some embodiments, a biosimilar is an antibody or antigen-binding fragment thereof that has a light chain that has the same primary amino acid sequence as compared to a reference antibody (e.g., adalimumab) and a heavy chain that has the same primary amino acid sequence as compared to the reference antibody. In some examples, a biosimilar is an antibody or antigen-binding fragment thereof that has a light chain that includes the same light chain variable domain sequence as a reference antibody (e.g., adalimumab) and a heavy chain that includes the same heavy chain variable domain sequence as a reference antibody. In some embodiments, a biosimilar can have a similar glycosylation pattern as compared to the reference antibody (e.g., adalimumab). In other embodiments, a biosimilar can have a different glycosylation pattern as compared to the reference antibody (e.g., adalimumab).

[0380] Changes in the N-linked glycosylation profile of a biosimilar as compared to a reference antibody (e.g., adalimumab) can be detected using 2-anthranilic acid (AA)-derivatization and normal phase liquid chromatography with fluorescence detection, as generally described in Kamoda et al., J. Chromatography J. 1133:332-339, 2006. For example, a biosimilar can have changes in one or more (e.g., two, three, four, five, six, seven, eight, nine, ten, or eleven) of the following types of N-glycosylation as compared to the reference antibody (e.g., adalimumab): neutrally-charged oligosaccharides; monosialylated fucose-containing oligosaccharides; monosialylated oligosaccharides; bisialylated fucose-containing oligosaccharide; bisialylated oligosaccharides; triantennary, trisiaylated oligosaccharides of form 1; triantennary, trisialylated oligosaccharides of form 2; mannose-6-phosphate oligosaccharides; monophosphorylated oligosaccharides; tetrasialylated oligosaccharides; monosialylated and monophosphorylated oligosaccharides; and bis-mannose-6-phosphate oligosaccharides.

[0381] In some embodiments, the biosimilar can have a change in one, two, or three of: the percentage of species having one C-terminal lysine, the percentage of species having two C-terminal lysines, and the percentage of species having three C-terminal lysines as compared to the reference antibody (e.g., adalimumab).

[0382] In some embodiments, the biosimilar can have a change in the level of one, two, or three of acidic species, neutral species, and basic species in the composition as compared to the reference antibody (e.g., adalimumab).

[0383] In some embodiments, the biosimilar can have a change in the level of sulfation as compared to the reference antibody.

[0384] In some embodiments, the TNFα inhibitor can be SAR252067 (e.g., a monoclonal antibody that specifically binds to TNFSF14, described in U.S. Patent Application Publication No. 2013/0315913) or MDGN-002 (described in U.S. Patent Application Publication No. 2015/0337046). In some embodiments, the TNFα inhibitor can be PF-06480605, which binds specifically to TNFSF15 (e.g., described in U.S. Patent Application Publication No. 2015/0132311). Additional examples of TNFα inhibitors include DLCX105 (described in Tsianakas et al., Exp. Dermatol. 25:428-433, 2016) and PF-06480605, which binds specifically to TNFSF15 (described in U.S. Patent Application Publication No. 2015/0132311). Further examples of TNFα inhibitors that are antibodies or antigen-binding antibody fragments are described in, e.g., WO 17/158097, EP 3219727, WO 16/156465, and WO 17/167997.

[0385] In some embodiments, any of the antibodies or antigen-binding fragments described herein has a dissociation constant (K_{D}) of less than 1×10⁻⁵M (e.g., less than 0.5×10⁻⁵M, less than 1×10⁻⁶ M, less than 0.5×10⁻⁶ M, less than 1×10⁻⁷M, less than 0.5×10⁻⁷ M, less than 1×10⁻⁸M, less than 0.5×10⁻⁸M, less than 1×10⁻⁹M, less than 0.5×10⁻⁹M, less than 1×10⁻¹⁰ M, less than 0.5×10⁻¹⁰ M, less than 1×10⁻¹¹M, less than 0.5×10⁻¹¹M, or less than 1×10⁻¹²M), e.g., as measured in phosphate buffered saline using surface plasmon resonance (SPR).

[0386] In some embodiments, any of the antibodies or antigen-binding fragments described herein has a K_{D} of about 1×10⁻¹² M to about 1×10⁻⁵M, about 0.5×10⁻⁵ M, about 1×10⁻⁶ M, about 0.5×10⁻⁶ M, about 1×10⁻⁷ M, about 0.5×10⁻⁷M, about 1×10⁻⁸M, about 0.5×10⁻⁸ M, about 1×10⁻⁹M, about 0.5×10⁻⁹M, about 1×10⁻¹⁰ M, about 0.5×10⁻¹⁰ M, about 1×10⁻¹¹ M, or about 0.5×10⁻¹¹M (inclusive); about 0.5×10⁻¹¹M to about 1×10⁻⁵M, about 0.5×10⁻⁵M, about 1×10⁻⁶ M, about 0.5×10⁻⁶ M, about 1×10⁻⁶ M, about 0.5×10⁻⁷M, about 1×10⁻⁸M, about 0.5×10⁻⁸M, about 1×10⁻⁹M, about 0.5×10⁻⁹M, about 1×10⁻¹⁰ M, about 0.5×10⁻¹⁰ M, or about 1×10⁻¹¹M (inclusive); about 1×10⁻¹¹M to about 1×10⁻⁵M, about 0.5×10⁻⁵M, about 1×10⁻⁶ M, about 0.5×10⁻⁶ M, about 1×10⁻⁷ M, about 0.5×10⁻⁷ M, about 1×10⁻⁸M, about 0.5×10⁻⁸M, about 1×10⁻⁹M, about 0.5×10⁻⁹M, about 1×10⁻¹⁰M, or about 0.5×10⁻¹⁰ M (inclusive); about 0.5×10⁻¹⁰M to about 1×10⁻⁵M, about 0.5×10⁻⁵M, about 1×10⁻⁶ M, about 0.5×10⁻⁶ M, about 1×10⁻⁷ M, about 0.5×10⁻⁷ M, about 1×10⁻⁸M, about 0.5×10⁻⁸M, about 1×10⁻⁹M, about 0.5×10⁻⁹M, or about 1×10⁻¹⁰ M (inclusive); about 1×10⁻¹⁰ M to about 1×10⁻⁵M, about 0.5×10⁻⁵M, about 1×10⁻⁶ M, about 0.5×10⁻⁶ M, about 1×10⁻⁷ M, about 0.5×10⁻⁷M, about 1×10⁻⁸M, about 0.5×10⁻⁸M, about 1×10⁻⁹ M, or about 0.5×10⁻⁹M (inclusive); about 0.5×10⁻⁹M to about 1×10⁻⁵M, about 0.5×10⁻⁵ M, about 1×10⁻⁶ M, about 0.5×10⁻⁶ M, about 1×10⁻⁷ M, about 0.5×10⁻⁷ M, about 1×10⁻⁸ M, about 0.5×10⁻⁸M, or about 1×10⁻⁹M (inclusive); about 1×10⁻⁹M to about 1×10⁻⁵M, about 0.5×10⁻⁵M, about 1×10⁻⁶ M, about 0.5×10⁻⁶ M, about 1×10⁻⁷ M, about 0.5×10⁻⁷ M, about 1×10⁻⁸M, or about 0.5×10⁻⁸M (inclusive); about 0.5×10⁻⁸M to about 1×10⁻⁵ M, about 0.5×10⁻⁵M, about 1×10⁻⁶ M, about 0.5×10⁻⁶ M, about 1×10⁻⁷ M, about 0.5×10⁻⁷ M, or about 1×10⁻⁸M (inclusive); about 1×10⁻⁸M to about 1×10⁻⁵M, about 0.5×10⁻⁵M, about 1×10⁻⁶ M, about 0.5×10⁻⁶ M, about 1×10⁻⁷ M, or about 0.5×10⁻⁷M (inclusive); about 0.5×10⁻⁷ M to about 1×10⁻⁵M, about 0.5×10⁻⁵M, about 1×10⁻⁶ M, about 0.5×10⁻⁶ M, or about 1×10⁻⁷ M (inclusive); about 1×10⁻⁷ M to about 1×10⁻⁵M, about 0.5×10⁻⁵M, about 1×10⁻⁶ M, or about 0.5×10⁻⁶ M (inclusive); about 0.5×10⁻⁶ M to about 1×10⁻⁵M, about 0.5×10⁻⁵M, or about 1×10⁻⁶ M (inclusive); about 1×10⁻⁶ M to about 1×10⁻⁵M or about 0.5×10⁻⁵M (inclusive); or about 0.5×10⁻⁵M to about 1×10⁻⁵M (inclusive), e.g., as measured in phosphate buffered saline using surface plasmon resonance (SPR).

[0387] In some embodiments, any of the antibodies or antigen-binding fragments described herein has a K_{off} of about 1×10⁻⁶ s⁻¹ to about 1×10⁻³ s⁻¹, about 0.5×10⁻³ s⁻¹, about 1×10⁻⁴ s⁻¹, about 0.5×10⁻⁴ s⁻¹, about 1×10⁻⁵ s⁻¹, or about 0.5×10⁻⁵ s⁻¹ (inclusive); about 0.5×10⁻⁵ s⁻¹ to about 1×10⁻³ s⁻¹, about 0.5×10⁻³ s⁻¹, about 1×10⁻⁴ s⁻¹, about 0.5×10⁻⁴ s⁻¹, or about 1×10⁻⁵ s⁻¹ (inclusive); about 1×10⁻⁵ s⁻¹ to about 1×10⁻³ s⁻¹, about 0.5×10⁻³ s⁻¹, about 1×10⁻⁴ s⁻¹, or about 0.5×10⁻⁴ s⁻¹ (inclusive); about 0.5×10⁻⁴ s⁻¹ to about 1×10⁻³ s⁻¹, about 0.5×10⁻³ s⁻¹, or about 1×10⁻⁴ s⁻¹ (inclusive); about 1×10⁻⁴ s^{″1} to about 1×10⁻³ s⁻¹, or about 0.5×10⁻³ s⁻¹ (inclusive); or about 0.5×10⁻⁵ s⁻¹ to about 1×10⁻³ s⁻¹ (inclusive), e.g., as measured in phosphate buffered saline using surface plasmon resonance (SPR).

[0388] In some embodiments, any of the antibodies or antigen-binding fragments described herein has a Kₒₙ of about 1×10² M⁻¹s⁻¹ to about 1×10⁶ M⁻¹s⁻¹, about 0.5×10⁶ M⁻¹s⁻¹, about 1×10⁵ M⁻¹s⁻¹, about 0.5×10⁵ M⁻¹s⁻¹, about 1×10⁴ M⁻¹s⁻¹, about 0.5×10⁴ M⁻¹s⁻¹, about 1×10³ M⁻¹s⁻¹, or about 0.5×10³ M⁻¹s⁻¹(inclusive); about 0.5×10³ M⁻¹s⁻¹ to about 1×10⁶ M⁻¹s⁻¹, about 0.5×10⁶ M⁻¹s⁻¹, about 1×10⁵ M⁻¹s⁻¹, about 0.5×10⁵ M⁻¹s⁻¹, about 1×10⁴ M⁻¹s⁻¹, about 0.5×10⁴ M⁻¹s⁻¹, or about 1×10³ M⁻¹s⁻¹ (inclusive); about 1×10³ M⁻¹s⁻¹ to about 1×10⁶M⁻¹s⁻¹, about 0.5×10⁶ M⁻¹s⁻¹, about 1×10⁵ M⁻¹s⁻¹, about 0.5×10⁵ M⁻¹s⁻¹, about 1×10⁴ M⁻¹s⁻¹, or about 0.5×10⁴ M⁻¹s⁻¹ (inclusive); about 0.5×10⁴ M⁻¹s⁻¹ to about 1×10⁶ M⁻¹s⁻¹, about 0.5×10⁶ M⁻¹s⁻¹, about 1×10⁵ M⁻¹s⁻¹, about 0.5×10⁵ M⁻¹s⁻¹, or about 1×10⁴ M⁻¹s⁻¹ (inclusive); about 1×10⁴ M⁻¹s⁻¹ to about 1×10⁶ M⁻¹s⁻¹, about 0.5×10⁶ M⁻¹s⁻¹, about 1×10⁵ M⁻¹s⁻¹, or about 0.5×10⁵ M⁻¹s⁻¹(inclusive); about 0.5×10⁵ M⁻¹s⁻¹ to about 1×10⁶ M⁻¹s⁻¹, about 0.5×10⁶ M⁻¹s⁻¹, or about 1×10⁵ M⁻¹s⁻¹(inclusive); about 1×10⁵ M⁻¹s⁻¹ to about 1×10⁶ M⁻¹s⁻¹, or about 0.5×10⁶ M⁻¹s⁻¹ (inclusive); or about 0.5×10⁶ M⁻¹s⁻¹ to about 1×10⁶ M⁻¹s⁻¹ (inclusive), e.g., as measured in phosphate buffered saline using surface plasmon resonance (SPR).

### Fusion Proteins

[0389] In some embodiments, the TNFα inhibitory agent is a fusion protein (e.g., an extracellular domain of a TNFR fused to a partner peptide, e.g., an Fc region of an immunoglobulin, e.g., human IgG) (see, e.g., Peppel et al., J. Exp. Med. 174(6):1483-1489, 1991; Deeg et al., Leukemia 16(2):162, 2002) or a soluble TNFR (e.g., TNFR1 or TNFR2) that binds specifically to TNFα. In some embodiments, the TNFα inhibitor includes or is etanercept (Enbrel™) (see, e.g., WO 91/03553 and WO 09/406,476, incorporated by reference herein). In some embodiments, the TNFα inhibitor includes or is r-TBP-I (e.g., Gradstein et al., J. Acquir. Immune Defic. Syndr. 26(2): 111-117, 2001). In some embodiments, the TNFα inhibitor includes or is a soluble TNFα receptor (e.g., Watt et al., J Leukoc Biol. 66(6):1005-1013, 1999; Tsao et al., Eur Respir J. 14(3):490-495, 1999; Kozak et al., Am. J. Physiol. Reg. Integrative Comparative Physiol. 269(1):R23-R29, 1995; Mohler et al., J. Immunol. 151(3):1548-1561, 1993; Nophar et al., EMBO J. 9(10):3269, 1990; Bjornberg et al., Lymphokine Cytokine Res. 13(3):203-211, 1994; Piguet et al., Eur. Respiratory J. 7(3):515-518, 1994; and Gray et al., Proc. Natl. Acad. Sci. U.S.A. 87(19):7380-7384, 1990).

### Small Molecules

[0390] In some embodiments, the TNFα inhibitor is a small molecule. In some embodiments, the TNFα inhibitor is C87 (Ma et al., J. Biol. Chem. 289(18):12457-66, 2014). In some embodiments, the small molecule is LMP-420 (e.g., Haraguchi et al., AIDS Res. Ther. 3:8, 2006). In some embodiments, the small molecule is a tumor necrosis factor-converting enzyme (TACE) inhibitor (e.g., Moss et al., Nature Clinical Practice Rheumatology 4: 300-309, 2008). In some embodiments, the TACE inhibitor is TMI-005 and BMS-561392. Additional examples of small molecule inhibitors are described in, e.g., He et al., Science 310(5750):1022-1025, 2005.

[0391] In some examples, the TNFα inhibitor is a small molecule that inhibits the activity of one of TRADD, TRAF2, MEKK1/4, MEKK4/7, JNK, AP-1, ASK1, RIP, MEKK 3/6, MAPK, NIK, IKK, and NF-κB, in a mammalian cell.

[0392] In some examples, the TNFα inhibitor is a small molecule that inhibits the activity of one of CD14, MyD88 (see, e.g., Olson et al., Scientific Reports 5:14246, 2015), IRAK (Chaudhary et al., J. Med. Chem. 58(1):96-110, 2015), lipopolysaccharide binding protein (LBP) (see, e.g., U.S. Pat. No. 5,705,398), TRAF6 (e.g., 3-[(2,5-Dimethylphenyl)amino]-1-phenyl-2-propen-1-one), ras (e.g., Baker et al., Nature 497:577-578, 2013), raf (e.g., vemurafenib (PLX4032, RG7204), sorafenib tosylate, PLX-4720, dabrafenib (GSK2118436), GDC-0879, RAF265 (CHIR-265), AZ 628, NVP-BHG712, SB590885, ZM 336372, sorafenib, GW5074, TAK-632, CEP-32496, encorafenib (LGX818), CCT196969, LY3009120, R05126766 (CH5126766), PLX7904, and MLN2480), MEK1/2 (e.g., Facciorusso et al., Expert Review Gastroentrol. Hepatol. 9:993-1003, 2015), ERK1/2 (e.g., Mandal et al., Oncogene 35:2547-2561, 2016), NIK (e.g., Mortier et al., Bioorg. Med. Chem. Lett. 20:4515-4520, 2010), IKK (e.g., Reilly et al., Nature Med. 19:313-321, 2013), IκB (e.g., Suzuki et al., Expert. Opin. Invest. Drugs 20:395-405, 2011), NF-κB (e.g., Gupta et al., Biochim. Biophys. Acta 1799(10-12):775-787, 2010), rac (e.g., U.S. Pat. No. 9,278,956), MEK4/7, JNK (e.g., AEG 3482, BI 78D3, CEP 1347, c-JUN peptide, IQ 1S, JIP-1 (153-163), SP600125, SU 3327, and TCS JNK6o), c-jun (e.g., AEG 3482, BI 78D3, CEP 1347, c-JUN peptide, IQ 1S, JIP-1 (153-163), SP600125, SU 3327, and TCS JNK6o), MEK3/6 (e.g., Akinleye et al., J. Hematol. Oncol. 6:27, 2013), p38 (e.g., AL 8697, AMG 548, BIRB 796, CMPD-1, DBM 1285 dihydrochloride, EO 1428, JX 401, ML 3403, Org 48762-0, PH 797804, RWJ 67657, SB 202190, SB 203580, SB 239063, SB 706504, SCIO 469, SKF 86002, SX 011, TA 01, TA 02, TAK 715, VX 702, and VX 745), PKR (e.g., 2-aminopurine or CAS 608512-97-6), TTP (e.g., CAS 329907-28-0), and MK2 (PF 3644022 and PHA 767491).

### IL-6 Receptor Inhibitors

[0393] The term “IL-6 receptor inhibitor” refers to an agent which decreases IL-6 receptor expression and/or the ability of IL-6 to bind to an IL-6 receptor. In some embodiments, the IL-6 receptor inhibitor targets the IL-6 receptor β-subunit, glycoprotein 130 (sIL6gp130). In other embodiments, the IL-6 receptor inhibitor targets the IL-6 receptor subunit (IL6R). In other embodiments, the IL-6 receptor inhibitor targets the complex consisting of both the IL-6 receptor subunit (IL6R) and the IL-6 receptor β-subunit, glycoprotein 130 (sIL6gp130). In some embodiments, the IL-6 receptor inhibitor targets IL-6.

[0394] In some embodiments, an IL-6 receptor inhibitor is an inhibitory nucleic acid, an antibody or an antigen-binding fragment thereof, a fusion protein, a IL-6 receptor antagonist, or a small molecule. In some embodiments, the inhibitory nucleic acid is a small interfering RNA, an antisense nucleic acid, an aptamer, or a microRNA. Exemplary IL-6 receptor inhibitors are described herein. Additional examples of IL-6 receptor inhibitors are known in the art.

[0395] Exemplary aspects of different inhibitory nucleic acids are described below. Any of the examples of inhibitory nucleic acids that can decrease expression of an IL6R, sIL6gp130, or IL-6 mRNA. Inhibitory nucleic acids that can decrease the expression of IL6R, sIL6gp130, or IL-6 mRNA in a mammalian cell include antisense nucleic acid molecules, i.e., nucleic acid molecules whose nucleotide sequence is complementary to all or part of an IL6R, sIL6gp130, or IL-6 mRNA (e.g., complementary to all or a part of any one of SEQ ID NOs: 50-55).

| Human IL6R mRNA Variant 1 | |
|---|---|
| (SEQ ID NO: 50) | |
| 1 | ggcggtcccc tgttctcccc gctcaggtgc ggcgctgtgg caggaagcca ccccctcggt |
| 61 | cggccggtgc gcggggctgt tgcgccatcc gctccggctt tcgtaaccgc accctgggac |
| 121 | ggcccagaga cgctccagcg cgagttcctc aaatgttttc ctgcgttgcc aggaccgtcc |
| 181 | gccgctctga gtcatgtgcg agtgggaagt cgcactgaca ctgagccggg ccagagggag |
| 241 | aggagccgag cgcggcgcgg ggccgaggga ctcgcagtgt gtgtagagag ccgggctcct |
| 301 | gcggatgggg gctgcccccg gggcctgagc ccgcctgccc gcccaccgcc ccgccccgcc |
| 361 | cctgccaccc ctgccgcccg gttcccatta gcctgtccgc ctctgcggga ccatggagtg |
| 421 | gtagccgagg aggaagcatg ctggccgtcg gctgcgcgct gctggctgcc ctgctggccg |
| 481 | cgccgggagc ggcgctggcc ccaaggcgct gccctgcgca ggaggtggcg agaggcgtgc |
| 541 | tgaccagtct gccaggagac agcgtgactc tgacctgccc gggggtagag ccggaagaca |
| 601 | atgccactgt tcactgggtg ctcaggaagc cggctgcagg ctcccacccc agcagatggg |
| 661 | ctggcatggg aaggaggctg ctgctgaggt cggtgcagct ccacgactct ggaaactatt |
| 721 | catgctaccg ggccggccgc ccagctggga ctgtgcactt gctggtggat gttccccccg |
| 781 | aggagcccca gctctcctgc ttccggaaga gccccctcag caatgttgtt tgtgagtggg |
| 841 | gtcctcggag caccccatcc ctgacgacaa aggctgtgct cttggtgagg aagtttcaga |
| 901 | acagtccggc cgaagacttc caggagccgt gccagtattc ccaggagtcc cagaagttct |
| 961 | cctgccagtt agcagtcccg gagggagaca gctctttcta catagtgtcc atgtgcgtcg |
| 1021 | ccagtagtgt cgggagcaag ttcagcaaaa ctcaaacctt tcagggttgt ggaatcttgc |
| 1081 | agcctgatcc gcctgccaac atcacagtca ctgccgtggc cagaaacccc cgctggctca |
| 1141 | gtgtcacctg gcaagacccc cactcctgga actcatcttt ctacagacta cggtttgagc |
| 1201 | tcagatatcg ggctgaacgg tcaaagacat tcacaacatg gatggtcaag gacctccagc |
| 1261 | atcactgtgt catccacgac gcctggagcg gcctgaggca cgtggtgcag cttcgtgccc |
| 1321 | aggaggagtt cgggcaaggc gagtggagcg agtggagccc ggaggccatg ggcacgcctt |
| 1381 | ggacagaatc caggagtcct ccagctgaga acgaggtgtc cacccccatg caggcactta |
| 1441 | ctactaataa agacgatgat aatattctct tcagagattc tgcaaatgcg acaagcctcc |
| 1501 | cagtgcaaga ttcttcttca gtaccactgc ccacattcct ggttgctgga gggagcctgg |
| 1561 | ccttcggaac gctcctctgc attgccattg ttctgaggtt caagaagacg tggaagctgc |
| 1621 | gggctctgaa ggaaggcaag acaagcatgc atccgccgta ctctttgggg cagctggtcc |
| 1681 | cggagaggcc tcgacccacc ccagtgcttg ttcctctcat ctccccaccg gtgtccccca |
| 1741 | gcagcctggg gtctgacaat acctcgagcc acaaccgacc agatgccagg gacccacgga |
| 1801 | gcccttatga catcagcaat acagactact tcttccccag atagctggct gggtggcacc |
| 1861 | agcagcctgg accctgtgga tgataaaaca caaacgggct cagcaaaaga tgcttctcac |
| 1921 | tgccatgcca gcttatctca ggggtgtgcg gcctttggct tcacggaaga gccttgcgga |
| 1981 | aggttctacg ccaggggaaa atcagcctgc tccagctgtt cagctggttg aggtttcaaa |
| 2041 | cctccctttc caaatgccca gcttaaaggg gctagagtga acttgggcca ctgtgaagag |
| 2101 | aaccatatca agactctttg gacactcaca cggacactca aaagctgggc aggttggtgg |
| 2161 | gggcctcggt gtggagaagc ggctggcagc ccacccctca acacctctgc acaagctgca |
| 2221 | ccctcaggca ggtgggatgg atttccagcc aaagcctcct ccagccgcca tgctcctggc |
| 2281 | ccactgcatc gtttcatctt ccaactcaaa ctcttaaaac ccaagtgcct tagcaaattc |
| 2341 | tgtttttcta ggcctgggga cggcttttac ttaaaccgcc aaggctgggg gaagaagctc |
| 2401 | tctcctccct ttcttcccta cagttgaaaa acagctgagg gtgagtgggt gaataataca |
| 2461 | gtatctcagg gcctggtcgt tttcaacaga attataatta gttcctcatt agcattttgc |
| 2521 | taaatgtgaa tgatgatcct aggcatttgc tgaatacaga ggcaactgca ttggctttgg |
| 2581 | gttgcaggac ctcaggtgag aagcagagga aggagaggag aggggcacag ggtctctacc |
| 2641 | atcccctgta gagtgggagc tgagtggggg atcacagcct ctgaaaacca atgttctctc |
| 2701 | ttctccacct cccacaaagg agagctagca gcagggaggg cttctgccat ttctgagatc |
| 2761 | aaaacggttt tactgcagct ttgtttgttg tcagctgaac ctgggtaact agggaagata |
| 2821 | atattaagga agacaatgtg aaaagaaaaa tgagcctggc aagaatgtgt ttaaacttgg |
| 2881 | tttttaaaaa actgctgact gttttctctt gagagggtgg aatatccaat attcgctgtg |
| 2941 | tcagcataga agtaacttac ttaggtgtgg gggaagcacc ataactttgt ttagcccaaa |
| 3001 | accaagtcaa gtgaaaaagg aggaagagaa aaaatatttt cctgccaggc atggtggccc |
| 3061 | acgcacttcg ggaggtcgag gcaggaggat cacttgagtc cagaagtttg agatcagcct |
| 3121 | gggcaatgtg ataaaacccc atctctacaa aaagcataaa aattagccaa gtgtggtaga |
| 3181 | gtgtgcctga agtcccagat acttgggggg ctgaggtggg aggatctctt gagcctggga |
| 3241 | ggtcaaggct gcagtgagcc gagattgcac cactgcactc cagcctgggt gacagagcaa |
| 3301 | gtgagaccct gtctcaaaaa aagaaaaaga aaaagaaaaa atattttccc tattagagaa |
| 3361 | gagattgtgg tttcattctg tattttgttt ttgtcttaaa aagtggaaaa atagcctgcc |
| 3421 | tcttctctac tctagggaaa aaccagcgtg tgactactcc cccaggtggt tatggagagg |
| 3481 | gtgtccggtc cctgtcccag tgccgagaag gaagcctccc acgactgccc ggcagggtcc |
| 3541 | tagaaattcc ccaccctgaa agccctgagc tttctgctat caaagaggtt ttaaaaaaat |
| 3601 | cccatttaaa aaaaatccct tacctcggtg ccttcctctt tttatttagt tccttgagtt |
| 3661 | gattcagctc tgcaagaatt gaagcaggac taaatgtcta gttgtaacac catgattaac |
| 3721 | cacttcagct gacttttctg tccgagcttt gaaaattcag tggtgttagt ggttacccag |
| 3781 | ttagctctca agttatcagg gtattccaga gtggggatat gatttaaatc agccgtgtaa |
| 3841 | ccatggaccc aatatttacc agaccacaaa acttttctaa tactctaccc tcttagaaaa |
| 3901 | accaccacca tcaccagaca ggtgcgaaag gatgaaagtg accatgtttt gtttacggtt |
| 3961 | ttccaggttt aagctgttac tgtcttcagt aagccgtgat tttcattgct gggcttgtct |
| 4021 | gtagatttta gaccctattg ctgcttgagg caactcatct taggttggca aaaaggcagg |
| 4081 | atggccgggc gcggtggctc acgcctgtaa tcctagcact ttgggaggcc aaggtgggag |
| 4141 | gattgcttga gctcaggagt ttgagaccaa cctgggtaac atagtgagac accatctcta |
| 4201 | ttatgaacaa taacagttaa gaaaaaaaaa ggcaggcagg cggttatggt ggttccctcc |
| 4261 | catcccacca cataaagttt ctgagacttg agaacagcaa aatgctgtta aagggaaata |
| 4321 | ttaagaatga gaatctgcag taagggtgat tctgtgccca cagttcttca attctttata |
| 4381 | ccgttttacc cacatgtggt gttaccaaag ccgggcagaa ccatgctagc ggaagatgtg |
| 4441 | aaatccagat agctcattat tgccaagagc taggcagctt tgatctccaa attgttattg |
| 4501 | ctttcatttt tattgtaatg gaattgcttt gttttgtttt tttgtttttg tattgaagag |
| 4561 | ggttgttttc cctttatttt tcataagcta atgtaaatga agaaaaaatg tcttctctgg |
| 4621 | gctgtaggcc tggctcagcg tacacaggta tacatcctaa gctctctatg ttctctaatc |
| 4681 | tgtggtgact gaacatgtgt ctcaatgcac ggggcatttc tacctgtgtt tctgcagcac |
| 4741 | ccccactgcc ttgagtcccc agcagtgctg ttatttgcct aacacctgta gccatctgcc |
| 4801 | acgcagccag acgtgaaacg ctgagacaga gaccatttag gttaaatacg acagcttatc |
| 4861 | ctgctgggtg gggaaagtaa aaaatatgct ggttcaaggc ctaaagtaaa atgatcaata |
| 4921 | atgtttgtag cattaatgaa atattttcaa gaaatgtgtc caggggtagc actggctatg |
| 4981 | ttgacgaggc ctttggtaac tcagagagct cttggccctg atggggactt gcccttacgc |
| 5041 | tttctttatc aggctctgag ttcacacgga gcctctggca cttccctgct gtcttgggag |
| 5101 | aaaggaaact ggttgccgcg gcaggttgtg gaatctgttg ctggaaccag gctggaagcc |
| 5161 | cacctggtag tgaacagggc ccagtggggc aggctgggca tgttgtggtc tatgggtttg |
| 5221 | tttcctggag aatgttcagg aatgtcttcc cagctgcttt ggtgctgagc tctattatct |
| 5281 | cacagcacgt ccagaaggct aacccaggtg gggaggatgc tgacaccagc tccaggtgga |
| 5341 | gttggtggtc ttaatttgga gatgcagggg caacctgtga ccctttgagg caagagccct |
| 5401 | gcacccagct gtcccgtgca gccgtgggca ggggctgcac acggaggggc aggcgggcca |
| 5461 | gttcagggtc cgtgccaggc cctcctcagt gccctgtgaa ggcctcctgt cctccgtgcg |
| 5521 | gctgggcacc agcaccaggg agtttctatg gcaaccttag tgattattaa ggaacactgt |
| 5581 | cagttttatg aacatatgct caaatgaaat tctactttag gaggaaagga ttggaacagc |
| 5641 | atgtcacaag gctgttaatt aacagagaga ccttattgga tggagatcac atctgttaaa |
| 5701 | tagaatacct caactctacg ttgttttctt ggagataaat aatagtttca agtttttgtt |
| 5761 | tgtttgtttt acctaattac ctgaaagcaa ataccaaagg ctgatgtctg tatatggggc |
| 5821 | aaagggtcag tatatttttc agtgtttttt tttctaccag ctattttgca tttaaagtga |
| 5881 | acattgtgtt tggaataaat actcttaaaa aataaaaaaa aaaaaaaa |
| Human IL6R mRNA Variant 2 | |
| (SEQ ID NO: 51) | |
| 1 | ggcggtcccc tgttctcccc gctcaggtgc ggcgctgtgg caggaagcca ccccctcggt |
| 61 | cggccggtgc gcggggctgt tgcgccatcc gctccggctt tcgtaaccgc accctgggac |
| 121 | ggcccagaga cgctccagcg cgagttcctc aaatgttttc ctgcgttgcc aggaccgtcc |
| 181 | gccgctctga gtcatgtgcg agtgggaagt cgcactgaca ctgagccggg ccagagggag |
| 241 | aggagccgag cgcggcgcgg ggccgaggga ctcgcagtgt gtgtagagag ccgggctcct |
| 301 | gcggatgggg gctgcccccg gggcctgagc ccgcctgccc gcccaccgcc ccgccccgcc |
| 361 | cctgccaccc ctgccgcccg gttcccatta gcctgtccgc ctctgcggga ccatggagtg |
| 421 | gtagccgagg aggaagcatg ctggccgtcg gctgcgcgct gctggctgcc ctgctggccg |
| 481 | cgccgggagc ggcgctggcc ccaaggcgct gccctgcgca ggaggtggcg agaggcgtgc |
| 541 | tgaccagtct gccaggagac agcgtgactc tgacctgccc gggggtagag ccggaagaca |
| 601 | atgccactgt tcactgggtg ctcaggaagc cggctgcagg ctcccacccc agcagatggg |
| 661 | ctggcatggg aaggaggctg ctgctgaggt cggtgcagct ccacgactct ggaaactatt |
| 721 | catgctaccg ggccggccgc ccagctggga ctgtgcactt gctggtggat gttccccccg |
| 781 | aggagcccca gctctcctgc ttccggaaga gccccctcag caatgttgtt tgtgagtggg |
| 841 | gtcctcggag caccccatcc ctgacgacaa aggctgtgct cttggtgagg aagtttcaga |
| 901 | acagtccggc cgaagacttc caggagccgt gccagtattc ccaggagtcc cagaagttct |
| 961 | cctgccagtt agcagtcccg gagggagaca gctctttcta catagtgtcc atgtgcgtcg |
| 1021 | ccagtagtgt cgggagcaag ttcagcaaaa ctcaaacctt tcagggttgt ggaatcttgc |
| 1081 | agcctgatcc gcctgccaac atcacagtca ctgccgtggc cagaaacccc cgctggctca |
| 1141 | gtgtcacctg gcaagacccc cactcctgga actcatcttt ctacagacta cggtttgagc |
| 1201 | tcagatatcg ggctgaacgg tcaaagacat tcacaacatg gatggtcaag gacctccagc |
| 1261 | atcactgtgt catccacgac gcctggagcg gcctgaggca cgtggtgcag cttcgtgccc |
| 1321 | aggaggagtt cgggcaaggc gagtggagcg agtggagccc ggaggccatg ggcacgcctt |
| 1381 | ggacagaatc caggagtcct ccagctgaga acgaggtgtc cacccccatg caggcactta |
| 1441 | ctactaataa agacgatgat aatattctct tcagagattc tgcaaatgcg acaagcctcc |
| 1501 | caggttcaag aagacgtgga agctgcgggc tctgaaggaa ggcaagacaa gcatgcatcc |
| 1561 | gccgtactct ttggggcagc tggtcccgga gaggcctcga cccaccccag tgcttgttcc |
| 1621 | tctcatctcc ccaccggtgt cccccagcag cctggggtct gacaatacct cgagccacaa |
| 1681 | ccgaccagat gccagggacc cacggagccc ttatgacatc agcaatacag actacttctt |
| 1741 | ccccagatag ctggctgggt ggcaccagca gcctggaccc tgtggatgat aaaacacaaa |
| 1801 | cgggctcagc aaaagatgct tctcactgcc atgccagctt atctcagggg tgtgcggcct |
| 1861 | ttggcttcac ggaagagcct tgcggaaggt tctacgccag gggaaaatca gcctgctcca |
| 1921 | gctgttcagc tggttgaggt ttcaaacctc cctttccaaa tgcccagctt aaaggggcta |
| 1981 | gagtgaactt gggccactgt gaagagaacc atatcaagac tctttggaca ctcacacgga |
| 2041 | cactcaaaag ctgggcaggt tggtgggggc ctcggtgtgg agaagcggct ggcagcccac |
| 2101 | ccctcaacac ctctgcacaa gctgcaccct caggcaggtg ggatggattt ccagccaaag |
| 2161 | cctcctccag ccgccatgct cctggcccac tgcatcgttt catcttccaa ctcaaactct |
| 2221 | taaaacccaa gtgccttagc aaattctgtt tttctaggcc tggggacggc ttttacttaa |
| 2281 | accgccaagg ctgggggaag aagctctctc ctccctttct tccctacagt tgaaaaacag |
| 2341 | ctgagggtga gtgggtgaat aatacagtat ctcagggcct ggtcgttttc aacagaatta |
| 2401 | taattagttc ctcattagca ttttgctaaa tgtgaatgat gatcctaggc atttgctgaa |
| 2461 | tacagaggca actgcattgg ctttgggttg caggacctca ggtgagaagc agaggaagga |
| 2521 | gaggagaggg gcacagggtc tctaccatcc cctgtagagt gggagctgag tgggggatca |
| 2581 | cagcctctga aaaccaatgt tctctcttct ccacctccca caaaggagag ctagcagcag |
| 2641 | ggagggcttc tgccatttct gagatcaaaa cggttttact gcagctttgt ttgttgtcag |
| 2701 | ctgaacctgg gtaactaggg aagataatat taaggaagac aatgtgaaaa gaaaaatgag |
| 2761 | cctggcaaga atgtgtttaa acttggtttt taaaaaactg ctgactgttt tctcttgaga |
| 2821 | gggtggaata tccaatattc gctgtgtcag catagaagta acttacttag gtgtggggga |
| 2881 | agcaccataa ctttgtttag cccaaaacca agtcaagtga aaaaggagga agagaaaaaa |
| 2941 | tattttcctg ccaggcatgg tggcccacgc acttcgggag gtcgaggcag gaggatcact |
| 3001 | tgagtccaga agtttgagat cagcctgggc aatgtgataa aaccccatct ctacaaaaag |
| 3061 | cataaaaatt agccaagtgt ggtagagtgt gcctgaagtc ccagatactt ggggggctga |
| 3121 | ggtgggagga tctcttgagc ctgggaggtc aaggctgcag tgagccgaga ttgcaccact |
| 3181 | gcactccagc ctgggtgaca gagcaagtga gaccctgtct caaaaaaaga aaaagaaaaa |
| 3241 | gaaaaaatat tttccctatt agagaagaga ttgtggtttc attctgtatt ttgtttttgt |
| 3301 | cttaaaaagt ggaaaaatag cctgcctctt ctctactcta gggaaaaacc agcgtgtgac |
| 3361 | tactccccca ggtggttatg gagagggtgt ccggtccctg tcccagtgcc gagaaggaag |
| 3421 | cctcccacga ctgcccggca gggtcctaga aattccccac cctgaaagcc ctgagctttc |
| 3481 | tgctatcaaa gaggttttaa aaaaatccca tttaaaaaaa atcccttacc tcggtgcctt |
| 3541 | cctcttttta tttagttcct tgagttgatt cagctctgca agaattgaag caggactaaa |
| 3601 | tgtctagttg taacaccatg attaaccact tcagctgact tttctgtccg agctttgaaa |
| 3661 | attcagtggt gttagtggtt acccagttag ctctcaagtt atcagggtat tccagagtgg |
| 3721 | ggatatgatt taaatcagcc gtgtaaccat ggacccaata tttaccagac cacaaaactt |
| 3781 | ttctaatact ctaccctctt agaaaaacca ccaccatcac cagacaggtg cgaaaggatg |
| 3841 | aaagtgacca tgttttgttt acggttttcc aggtttaagc tgttactgtc ttcagtaagc |
| 3901 | cgtgattttc attgctgggc ttgtctgtag attttagacc ctattgctgc ttgaggcaac |
| 3961 | tcatcttagg ttggcaaaaa ggcaggatgg ccgggcgcgg tggctcacgc ctgtaatcct |
| 4021 | agcactttgg gaggccaagg tgggaggatt gcttgagctc aggagtttga gaccaacctg |
| 4081 | ggtaacatag tgagacacca tctctattat gaacaataac agttaagaaa aaaaaaggca |
| 4141 | ggcaggcggt tatggtggtt ccctcccatc ccaccacata aagtttctga gacttgagaa |
| 4201 | cagcaaaatg ctgttaaagg gaaatattaa gaatgagaat ctgcagtaag ggtgattctg |
| 4261 | tgcccacagt tcttcaattc tttataccgt tttacccaca tgtggtgtta ccaaagccgg |
| 4321 | gcagaaccat gctagcggaa gatgtgaaat ccagatagct cattattgcc aagagctagg |
| 4381 | cagctttgat ctccaaattg ttattgcttt catttttatt gtaatggaat tgctttgttt |
| 4441 | tgtttttttg tttttgtatt gaagagggtt gttttccctt tatttttcat aagctaatgt |
| 4501 | aaatgaagaa aaaatgtctt ctctgggctg taggcctggc tcagcgtaca caggtataca |
| 4561 | tcctaagctc tctatgttct ctaatctgtg gtgactgaac atgtgtctca atgcacgggg |
| 4621 | catttctacc tgtgtttctg cagcaccccc actgccttga gtccccagca gtgctgttat |
| 4681 | ttgcctaaca cctgtagcca tctgccacgc agccagacgt gaaacgctga gacagagacc |
| 4741 | atttaggtta aatacgacag cttatcctgc tgggtgggga aagtaaaaaa tatgctggtt |
| 4801 | caaggcctaa agtaaaatga tcaataatgt ttgtagcatt aatgaaatat tttcaagaaa |
| 4861 | tgtgtccagg ggtagcactg gctatgttga cgaggccttt ggtaactcag agagctcttg |
| 4921 | gccctgatgg ggacttgccc ttacgctttc tttatcaggc tctgagttca cacggagcct |
| 4981 | ctggcacttc cctgctgtct tgggagaaag gaaactggtt gccgcggcag gttgtggaat |
| 5041 | ctgttgctgg aaccaggctg gaagcccacc tggtagtgaa cagggcccag tggggcaggc |
| 5101 | tgggcatgtt gtggtctatg ggtttgtttc ctggagaatg ttcaggaatg tcttcccagc |
| 5161 | tgctttggtg ctgagctcta ttatctcaca gcacgtccag aaggctaacc caggtgggga |
| 5221 | ggatgctgac accagctcca ggtggagttg gtggtcttaa tttggagatg caggggcaac |
| 5281 | ctgtgaccct ttgaggcaag agccctgcac ccagctgtcc cgtgcagccg tgggcagggg |
| 5341 | ctgcacacgg aggggcaggc gggccagttc agggtccgtg ccaggccctc ctcagtgccc |
| 5401 | tgtgaaggcc tcctgtcctc cgtgcggctg ggcaccagca ccagggagtt tctatggcaa |
| 5461 | ccttagtgat tattaaggaa cactgtcagt tttatgaaca tatgctcaaa tgaaattcta |
| 5521 | ctttaggagg aaaggattgg aacagcatgt cacaaggctg ttaattaaca gagagacctt |
| 5581 | attggatgga gatcacatct gttaaataga atacctcaac tctacgttgt tttcttggag |
| 5641 | ataaataata gtttcaagtt tttgtttgtt tgttttacct aattacctga aagcaaatac |
| 5701 | caaaggctga tgtctgtata tggggcaaag ggtcagtata tttttcagtg tttttttttc |
| 5761 | taccagctat tttgcattta aagtgaacat tgtgtttgga ataaatactc ttaaaaaata |
| 5821 | aaaaaaaaaa aaaa |
| Human IL6R mRNA Variant 3 | |
| (SEQ ID NO: 52) | |
| 1 | ggcggtcccc tgttctcccc gctcaggtgc ggcgctgtgg caggaagcca ccccctcggt |
| 61 | cggccggtgc gcggggctgt tgcgccatcc gctccggctt tcgtaaccgc accctgggac |
| 121 | ggcccagaga cgctccagcg cgagttcctc aaatgttttc ctgcgttgcc aggaccgtcc |
| 181 | gccgctctga gtcatgtgcg agtgggaagt cgcactgaca ctgagccggg ccagagggag |
| 241 | aggagccgag cgcggcgcgg ggccgaggga ctcgcagtgt gtgtagagag ccgggctcct |
| 301 | gcggatgggg gctgcccccg gggcctgagc ccgcctgccc gcccaccgcc ccgccccgcc |
| 361 | cctgccaccc ctgccgcccg gttcccatta gcctgtccgc ctctgcggga ccatggagtg |
| 421 | gtagccgagg aggaagcatg ctggccgtcg gctgcgcgct gctggctgcc ctgctggccg |
| 481 | cgccgggagc ggcgctggcc ccaaggcgct gccctgcgca ggaggtggcg agaggcgtgc |
| 541 | tgaccagtct gccaggagac agcgtgactc tgacctgccc gggggtagag ccggaagaca |
| 601 | atgccactgt tcactgggtg ctcaggaagc cggctgcagg ctcccacccc agcagatggg |
| 661 | ctggcatggg aaggaggctg ctgctgaggt cggtgcagct ccacgactct ggaaactatt |
| 721 | catgctaccg ggccggccgc ccagctggga ctgtgcactt gctggtggat gttccccccg |
| 781 | aggagcccca gctctcctgc ttccggaaga gccccctcag caatgttgtt tgtgagtggg |
| 841 | gtcctcggag caccccatcc ctgacgacaa aggctgtgct cttggtgagg aagtttcaga |
| 901 | acagtccggc cgaagacttc caggagccgt gccagtattc ccaggagtcc cagaagttct |
| 961 | cctgccagtt agcagtcccg gagggagaca gctctttcta catagtgtcc atgtgcgtcg |
| 1021 | ccagtagtgt cgggagcaag ttcagcaaaa ctcaaacctt tcagggttgt ggaatcttgc |
| 1081 | agcctgatcc gcctgccaac atcacagtca ctgccgtggc cagaaacccc cgctggctca |
| 1141 | gtgtcacctg gcaagacccc cactcctgga actcatcttt ctacagacta cggtttgagc |
| 1201 | tcagatatcg ggctgaacgg tcaaagacat tcacaacatg gatggtcaag gacctccagc |
| 1261 | atcactgtgt catccacgac gcctggagcg gcctgaggca cgtggtgcag cttcgtgccc |
| 1321 | aggaggagtt cgggcaaggc gagtggagcg agtggagccc ggaggccatg ggcacgcctt |
| 1381 | ggacagacag gctttctcct cgttgcccag gatggagtac agcagtgcaa tcacagctca |
| 1441 | cggcaacttc tgcctcctgg gttcaagcaa tcctcccgcc tcagcctcct aagtagctgg |
| 1501 | gaccacaggc gtgtgccaca atgctaattt tttaaaaatg ttttgtagag acagggtttc |
| 1561 | accatgctgc ccaggctggt ctcgaactcc tggcctcaag tgatccacca gcctcagact |
| 1621 | cccaaagtgc tgggattact ggtgtgagcc actgcacctg actaaacttt aaattttttt |
| 1681 | ttttagacgg aatctcgctc tgttgcccag gctggagtgc agtggcatga tattggctca |
| 1741 | ctgcaagctc tgcctcttgg gttcacgcta ttctcctgcc tcagcctcct gagtagctgg |
| 1801 | gactacaggt gcacaccacc acgcccggct aatttttttt tttttttagt agagacgggg |
| 1861 | tttcactgtg ttggccaggc tggtcttgaa ctcctgacct cgtgatccac ccgcctcgcc |
| 1921 | ctcccaaaat gctgggatta caggtgtgag ccaccgcgcc tggcctaaac ttttaaaatt |
| 1981 | ttaatcaaat taatacatgc acatggcaaa gaagtaataa acagcttata acactgaaaa |
| 2041 | aaaaaaaaaa aaaaaaaa |
| Human IL-6 receptor β-subunit, glycoprotein 130 (sIL6gp130) | |
| (SEQ ID NO: 53) | |
| 1 | gagcagccaa aaggcccgcg gagtcgcgct gggccgcccc ggcgcagctg aaccgggggc |
| 61 | cgcgcctgcc aggccgacgg gtctggccca gcctggcgcc aaggggttcg tgcgctgtgg |
| 121 | agacgcggag ggtcgaggcg gcgcggcctg agtgaaaccc aatggaaaaa gcatgacatt |
| 181 | tagaagtaga agacttagct tcaaatccct actccttcac ttactaattt tgtgatttgg |
| 241 | aaatatccgc gcaagatgtt gacgttgcag acttgggtag tgcaagcctt gtttattttc |
| 301 | ctcaccactg aatctacagg tgaacttcta gatccatgtg gttatatcag tcctgaatct |
| 361 | ccagttgtac aacttcattc taatttcact gcagtttgtg tgctaaagga aaaatgtatg |
| 421 | gattattttc atgtaaatgc taattacatt gtctggaaaa caaaccattt tactattcct |
| 481 | aaggagcaat atactatcat aaacagaaca gcatccagtg tcacctttac agatatagct |
| 541 | tcattaaata ttcagctcac ttgcaacatt cttacattcg gacagcttga acagaatgtt |
| 601 | tatggaatca caataatttc aggcttgcct ccagaaaaac ctaaaaattt gagttgcatt |
| 661 | gtgaacgagg ggaagaaaat gaggtgtgag tgggatggtg gaagggaaac acacttggag |
| 721 | acaaacttca ctttaaaatc tgaatgggca acacacaagt ttgctgattg caaagcaaaa |
| 781 | cgtgacaccc ccacctcatg cactgttgat tattctactg tgtattttgt caacattgaa |
| 841 | gtctgggtag aagcagagaa tgcccttggg aaggttacat cagatcatat caattttgat |
| 901 | cctgtatata aagtgaagcc caatccgcca cataatttat cagtgatcaa ctcagaggaa |
| 961 | ctgtctagta tcttaaaatt gacatggacc aacccaagta ttaagagtgt tataatacta |
| 1021 | aaatataaca ttcaatatag gaccaaagat gcctcaactt ggagccagat tcctcctgaa |
| 1081 | gacacagcat ccacccgatc ttcattcact gtccaagacc ttaaaccttt tacagaatat |
| 1141 | gtgtttagga ttcgctgtat gaaggaagat ggtaagggat actggagtga ctggagtgaa |
| 1201 | gaagcaagtg ggatcaccta tgaagataga ccatctaaag caccaagttt ctggtataaa |
| 1261 | atagatccat cccatactca aggctacaga actgtacaac tcgtgtggaa gacattgcct |
| 1321 | ccttttgaag ccaatggaaa aatcttggat tatgaagtga ctctcacaag atggaaatca |
| 1381 | catttacaaa attacacagt taatgccaca aaactgacag taaatctcac aaatgatcgc |
| 1441 | tatctagcaa ccctaacagt aagaaatctt gttggcaaat cagatgcagc tgttttaact |
| 1501 | atccctgcct gtgactttca agctactcac cctgtaatgg atcttaaagc attccccaaa |
| 1561 | gataacatgc tttgggtgga atggactact ccaagggaat ctgtaaagaa atatatactt |
| 1621 | gagtggtgtg tgttatcaga taaagcaccc tgtatcacag actggcaaca agaagatggt |
| 1681 | accgtgcatc gcacctattt aagagggaac ttagcagaga gcaaatgcta tttgataaca |
| 1741 | gttactccag tatatgctga tggaccagga agccctgaat ccataaaggc ataccttaaa |
| 1801 | caagctccac cttccaaagg acctactgtt cggacaaaaa aagtagggaa aaacgaagct |
| 1861 | gtcttagagt gggaccaact tcctgttgat gttcagaatg gatttatcag aaattatact |
| 1921 | atattttata gaaccatcat tggaaatgaa actgctgtga atgtggattc ttcccacaca |
| 1981 | gaatatacat tgtcctcttt gactagtgac acattgtaca tggtacgaat ggcagcatac |
| 2041 | acagatgaag gtgggaagga tggtccagaa ttcactttta ctaccccaaa gtttgctcaa |
| 2101 | ggagaaattg aagccatagt cgtgcctgtt tgcttagcat tcctattgac aactcttctg |
| 2161 | ggagtgctgt tctgctttaa taagcgagac ctaattaaaa aacacatctg gcctaatgtt |
| 2221 | ccagatcctt caaagagtca tattgcccag tggtcacctc acactcctcc aaggcacaat |
| 2281 | tttaattcaa aagatcaaat gtattcagat ggcaatttca ctgatgtaag tgttgtggaa |
| 2341 | atagaagcaa atgacaaaaa gccttttcca gaagatctga aatcattgga cctgttcaaa |
| 2401 | aaggaaaaaa ttaatactga aggacacagc agtggtattg gggggtcttc atgcatgtca |
| 2461 | tcttctaggc caagcatttc tagcagtgat gaaaatgaat cttcacaaaa cacttcgagc |
| 2521 | actgtccagt attctaccgt ggtacacagt ggctacagac accaagttcc gtcagtccaa |
| 2581 | gtcttctcaa gatccgagtc tacccagccc ttgttagatt cagaggagcg gccagaagat |
| 2641 | ctacaattag tagatcatgt agatggcggt gatggtattt tgcccaggca acagtacttc |
| 2701 | aaacagaact gcagtcagca tgaatccagt ccagatattt cacattttga aaggtcaaag |
| 2761 | caagtttcat cagtcaatga ggaagatttt gttagactta aacagcagat ttcagatcat |
| 2821 | atttcacaat cctgtggatc tgggcaaatg aaaatgtttc aggaagtttc tgcagcagat |
| 2881 | gcttttggtc caggtactga gggacaagta gaaagatttg aaacagttgg catggaggct |
| 2941 | gcgactgatg aaggcatgcc taaaagttac ttaccacaga ctgtacggca aggcggctac |
| 3001 | atgcctcagt gaaggactag tagttcctgc tacaacttca gcagtaccta taaagtaaag |
| 3061 | ctaaaatgat tttatctgtg aattc |
| Human IL-6 mRNA Transcript 1 | |
| (SEQ ID NO: 54) | |
| 1 | gtctcaatat tagagtctca acccccaata aatataggac tggagatgtc tgaggctcat |
| 61 | tctgccctcg agcccaccgg gaacgaaaga gaagctctat ctcccctcca ggagcccagc |
| 121 | tatgaactcc ttctccacaa gcgccttcgg tccagttgcc ttctccctgg ggctgctcct |
| 181 | ggtgttgcct gctgccttcc ctgccccagt acccccagga gaagattcca aagatgtagc |
| 241 | cgccccacac agacagccac tcacctcttc agaacgaatt gacaaacaaa ttcggtacat |
| 301 | cctcgacggc atctcagccc tgagaaagga gacatgtaac aagagtaaca tgtgtgaaag |
| 361 | cagcaaagag gcactggcag aaaacaacct gaaccttcca aagatggctg aaaaagatgg |
| 421 | atgcttccaa tctggattca atgaggagac ttgcctggtg aaaatcatca ctggtctttt |
| 481 | ggagtttgag gtatacctag agtacctcca gaacagattt gagagtagtg aggaacaagc |
| 541 | cagagctgtg cagatgagta caaaagtcct gatccagttc ctgcagaaaa aggcaaagaa |
| 601 | tctagatgca ataaccaccc ctgacccaac cacaaatgcc agcctgctga cgaagctgca |
| 661 | ggcacagaac cagtggctgc aggacatgac aactcatctc attctgcgca gctttaagga |
| 721 | gttcctgcag tccagcctga gggctcttcg gcaaatgtag catgggcacc tcagattgtt |
| 781 | gttgttaatg ggcattcctt cttctggtca gaaacctgtc cactgggcac agaacttatg |
| 841 | ttgttctcta tggagaacta aaagtatgag cgttaggaca ctattttaat tatttttaat |
| 901 | ttattaatat ttaaatatgt gaagctgagt taatttatgt aagtcatatt tatattttta |
| 961 | agaagtacca cttgaaacat tttatgtatt agttttgaaa taataatgga aagtggctat |
| 1021 | gcagtttgaa tatcctttgt ttcagagcca gatcatttct tggaaagtgt aggcttacct |
| 1081 | caaataaatg gctaacttat acatattttt aaagaaatat ttatattgta tttatataat |
| 1141 | gtataaatgg tttttatacc aataaatggc attttaaaaa attcagcaaa aaaaaaa |
| Human IL-6 mRNA Transcript 2 | |
| (SEQ ID NO: 55) | |
| 1 | gtctcaatat tagagtctca acccccaata aatataggac tggagatgtc tgaggctcat |
| 61 | tctgccctcg agcccaccgg gaacgaaaga gaagctctat ctcccctcca ggagcccagc |
| 121 | tatgaactcc ttctccacaa acatgtaaca agagtaacat gtgtgaaagc agcaaagagg |
| 181 | cactggcaga aaacaacctg aaccttccaa agatggctga aaaagatgga tgcttccaat |
| 241 | ctggattcaa tgaggagact tgcctggtga aaatcatcac tggtcttttg gagtttgagg |
| 301 | tatacctaga gtacctccag aacagatttg agagtagtga ggaacaagcc agagctgtgc |
| 361 | agatgagtac aaaagtcctg atccagttcc tgcagaaaaa ggcaaagaat ctagatgcaa |
| 421 | taaccacccc tgacccaacc acaaatgcca gcctgctgac gaagctgcag gcacagaacc |
| 481 | agtggctgca ggacatgaca actcatctca ttctgcgcag ctttaaggag ttcctgcagt |
| 541 | ccagcctgag ggctcttcgg caaatgtagc atgggcacct cagattgttg ttgttaatgg |
| 601 | gcattccttc ttctggtcag aaacctgtcc actgggcaca gaacttatgt tgttctctat |
| 661 | ggagaactaa aagtatgagc gttaggacac tattttaatt atttttaatt tattaatatt |
| 721 | taaatatgtg aagctgagtt aatttatgta agtcatattt atatttttaa gaagtaccac |
| 781 | ttgaaacatt ttatgtatta gttttgaaat aataatggaa agtggctatg cagtttgaat |
| 841 | atcctttgtt tcagagccag atcatttctt ggaaagtgta ggcttacctc aaataaatgg |
| 901 | ctaacttata catattttta aagaaatatt tatattgtat ttatataatg tataaatggt |
| 961 | ttttatacca ataaatggca ttttaaaaaa ttcagcaaaa aaaaaa |

### Inhibitory Nucleic Acids

[0396] An antisense nucleic acid molecule can be complementary to all or part of a non-coding region of the coding strand of a nucleotide sequence encoding an IL6R, sIL6gp130, or IL-6 protein. Non-coding regions (5′ and 3′ untranslated regions) are the 5′ and 3′ sequences that flank the coding region in a gene and are not translated into amino acids.

[0397] Based upon the sequences disclosed herein, one of skill in the art can easily choose and synthesize any of a number of appropriate antisense nucleic acids to target a nucleic acid encoding an IL6R, sIL6gp130, or IL-6 protein described herein. Antisense nucleic acids targeting a nucleic acid encoding an IL6R, sIL6gp130, or IL-6 protein can be designed using the software available at the Integrated DNA Technologies website.

[0398] An antisense nucleic acid can be, for example, about 5, 10, 15, 20, 25, 30, 35, 40, 45, or 50 nucleotides or more in length. An antisense oligonucleotide can be constructed using chemical synthesis and enzymatic ligation reactions using procedures known in the art. For example, an antisense nucleic acid can be chemically synthesized using naturally occurring nucleotides or variously modified nucleotides designed to increase the biological stability of the molecules or to increase the physical stability of the duplex formed between the antisense and sense nucleic acids, e.g., phosphorothioate derivatives and acridine substituted nucleotides can be used.

[0399] Examples of modified nucleotides which can be used to generate an antisense nucleic acid include 5-fluorouracil, 5-bromouracil, 5-chlorouracil, 5-iodouracil, hypoxanthine, xanthine, 4-acetylcytosine, 5-(carboxyhydroxylmethyl) uracil, 5-carboxymethylaminomethyl-2-thiouridine, 5-carboxymethylaminomethyluracil, dihydrouracil, beta-D-galactosylqueosine, inosine, N6-isopentenyladenine, 1-methylguanine, 1-methylinosine, 2,2-dimethylguanine, 2-methyladenine, 2-methylguanine, 3-methylcytosine, 5-methylcytosine, N6-adenine, 7-methylguanine, 5-methylaminomethyluracil, 5-methoxyaminomethyl-2-thiouracil, beta-D-mannosylqueosine, 5′-methoxycarboxymethyluracil, 5-methoxyuracil, 2-methylthio-N6-isopentenyladenine, uracil-5-oxyacetic acid (v), wybutoxosine, pseudouracil, queosine, 2-thiocytosine, 5-methyl-2-thiouracil, 2-thiouracil, 4-thiouracil, 5-methyluracil, uracil-5-oxyacetic acid methylester, uracil-5-oxyacetic acid (v), 5-methyl-2-thiouracil, 3-(3-amino-3-N-2-carboxypropyl) uracil, (acp3)w, and 2,6-diaminopurine. Alternatively, the antisense nucleic acid can be produced biologically using an expression vector into which a nucleic acid has been subcloned in an antisense orientation (i.e., RNA transcribed from the inserted nucleic acid will be of an anti sense orientation to a target nucleic acid of interest).

[0400] The antisense nucleic acid molecules described herein can be prepared in vitro and administered to a mammal, e.g., a human. Alternatively, they can be generated in situ such that they hybridize with or bind to cellular mRNA and/or genomic DNA encoding an IL6R, sIL6gp130, or IL-6 protein to thereby inhibit expression, e.g., by inhibiting transcription and/or translation. The hybridization can be by conventional nucleotide complementarities to form a stable duplex, or, for example, in the case of an antisense nucleic acid molecule that binds to DNA duplexes, through specific interactions in the major groove of the double helix. The antisense nucleic acid molecules can be delivered to a mammalian cell using a vector (e.g., a lentivirus, a retrovirus, or an adenovirus vector).

[0401] An antisense nucleic acid can be an α-anomeric nucleic acid molecule. An α-anomeric nucleic acid molecule forms specific double-stranded hybrids with complementary RNA in which, contrary to the usual, β-units, the strands run parallel to each other (Gaultier et al., Nucleic Acids Res. 15:6625-6641, 1987). The antisense nucleic acid can also comprise a 2′-O-methylribonucleotide (Inoue et al., Nucleic Acids Res. 15:6131-6148, 1987) or a chimeric RNA-DNA analog (Inoue et al., FEBS Lett. 215:327-330, 1987).

[0402] Exemplary antisense nucleic acids that are IL-6 receptor inhibitors are described in Keller et al., J. Immunol. 154(8):4091-4098, 1995; and Jiang et al., Anticancer Res. 31(9): 2899-2906, 2011.

[0403] Another example of an inhibitory nucleic acid is a ribozyme that has specificity for a nucleic acid encoding an IL6R, sIL6gp130, or IL-6 protein (e.g., specificity for an IL6R, sIL6gp130, or IL-6 mRNA, e.g., specificity for any one of SEQ ID NOs: 50-55). Ribozymes are catalytic RNA molecules with ribonuclease activity that are capable of cleaving a single-stranded nucleic acid, such as an mRNA, to which they have a complementary region. Thus, ribozymes (e.g., hammerhead ribozymes (described in Haselhoff and Gerlach, Nature 334:585-591, 1988)) can be used to catalytically cleave mRNA transcripts to thereby inhibit translation of the protein encoded by the mRNA. A ribozyme having specificity for an IL6R, sIL6gp130, or IL-6 mRNA can be designed based upon the nucleotide sequence of any of the IL6R, sIL6gp130, or IL-6 mRNA sequences disclosed herein. For example, a derivative of a Tetrahymena L-19 IVS RNA can be constructed in which the nucleotide sequence of the active site is complementary to the nucleotide sequence to be cleaved in an IL6R, sIL6gp130, or IL-6 mRNA (see, e.g., U.S. Pat. Nos. 4,987,071 and 5,116,742). Alternatively, a SMAD7 mRNA can be used to select a catalytic RNA having a specific ribonuclease activity from a pool of RNA molecules. See, e.g., Bartel et al., Science 261:1411-1418, 1993.

[0404] An inhibitory nucleic acid can also be a nucleic acid molecule that forms triple helical structures. For example, expression of an IL6R, sIL6gp130, or IL-6 polypeptide can be inhibited by targeting nucleotide sequences complementary to the regulatory region of the gene encoding the IL6R, sIL6gp130, or IL-6 polypeptide (e.g., the promoter and/or enhancer, e.g., a sequence that is at least 1 kb, 2 kb, 3 kb, 4 kb, or 5 kb upstream of the transcription initiation start state) to form triple helical structures that prevent transcription of the gene in target cells. See generally Helene, Anticancer Drug Des. 6(6):569-84, 1991; Helene, Ann. N.Y. Acad. Sci. 660:27-36, 1992; and Maher, Bioassays 14(12):807-15, 1992.

[0405] In various embodiments, inhibitory nucleic acids can be modified at the base moiety, sugar moiety, or phosphate backbone to improve, e.g., the stability, hybridization, or solubility of the molecule. For example, the deoxyribose phosphate backbone of the nucleic acids can be modified to generate peptide nucleic acids (see, e.g., Hyrup et al., Bioorganic Medicinal Chem. 4(1):5-23, 1996). Peptide nucleic acids (PNAs) are nucleic acid mimics, e.g., DNA mimics, in which the deoxyribose phosphate backbone is replaced by a pseudopeptide backbone and only the four natural nucleobases are retained. The neutral backbone of PNAs allows for specific hybridization to DNA and RNA under conditions of low ionic strength. The synthesis of PNA oligomers can be performed using standard solid phase peptide synthesis protocols (see, e.g., Perry-O'Keefe et al., Proc. Natl. Acad. Sci. U.S.A. 93:14670-675, 1996). PNAs can be used as antisense or antigene agents for sequence-specific modulation of gene expression by, e.g., inducing transcription or translation arrest or inhibiting replication.

[0406] PNAs can be modified, e.g., to enhance their stability or cellular uptake, by attaching lipophilic or other helper groups to PNA, by the formation of PNA-DNA chimeras, or by the use of liposomes or other techniques of drug delivery known in the art. For example, PNA-DNA chimeras can be generated which may combine the advantageous properties of PNA and DNA. Such chimeras allow DNA recognition enzymes, e.g., RNAse H and DNA polymerases, to interact with the DNA portion while the PNA portion would provide high binding affinity and specificity. PNA-DNA chimeras can be linked using linkers of appropriate lengths selected in terms of base stacking, number of bonds between the nucleobases, and orientation.

[0407] The synthesis of PNA-DNA chimeras can be performed as described in Finn et al., Nucleic Acids Res. 24:3357-63, 1996. For example, a DNA chain can be synthesized on a solid support using standard phosphoramidite coupling chemistry and modified nucleoside analogs. Compounds such as 5′-(4-methoxytrityl)amino-5′-deoxy-thymidine phosphoramidite can be used as a link between the PNA and the 5′ end of DNA (Mag et al., Nucleic Acids Res. 17:5973-88, 1989). PNA monomers are then coupled in a stepwise manner to produce a chimeric molecule with a 5′ PNA segment and a 3′ DNA segment (Finn et al., Nucleic Acids Res. 24:3357-63, 1996). Alternatively, chimeric molecules can be synthesized with a 5′ DNA segment and a 3′ PNA segment (Peterser et al., Bioorganic Med. Chem. Lett. 5:1119-11124, 1975).

[0408] In some embodiments, the inhibitory nucleic acids can include other appended groups such as peptides, or agents facilitating transport across the cell membrane (see, Letsinger et al., Proc. Natl. Acad. Sci. U.S.A. 86:6553-6556, 1989; Lemaitre et al., Proc. Natl. Acad. Sci. U.S.A. 84:648-652, 1989; and WO 88/09810). In addition, the inhibitory nucleic acids can be modified with hybridization-triggered cleavage agents (see, e.g., Krol et al., Bio/Techniques 6:958-976, 1988) or intercalating agents (see, e.g., Zon, Pharm. Res. 5:539-549, 1988). To this end, the oligonucleotide may be conjugated to another molecule, e.g., a peptide, hybridization triggered cross-linking agent, transport agent, hybridization-triggered cleavage agent, etc.

[0409] Another means by which expression of an IL6R, sIL6gp130, or IL-6 mRNA can be decreased in a mammalian cell is by RNA interference (RNAi). RNAi is a process in which mRNA is degraded in host cells. To inhibit an mRNA, double-stranded RNA (dsRNA) corresponding to a portion of the gene to be silenced (e.g., a gene encoding an IL6R, sIL6gp130, or IL-6 polypeptide) is introduced into a mammalian cell. The dsRNA is digested into 21-23 nucleotide-long duplexes called short interfering RNAs (or siRNAs), which bind to a nuclease complex to form what is known as the RNA-induced silencing complex (or RISC). The RISC targets the homologous transcript by base pairing interactions between one of the siRNA strands and the endogenous mRNA. It then cleaves the mRNA about 12 nucleotides from the 3′ terminus of the siRNA (see Sharp et al., Genes Dev. 15:485-490, 2001, and Hammond et al., Nature Rev. Gen. 2:110-119, 2001).

[0410] RNA-mediated gene silencing can be induced in a mammalian cell in many ways, e.g., by enforcing endogenous expression of RNA hairpins (see, Paddison et al., Proc. Natl. Acad. Sci. U.S.A. 99:1443-1448, 2002) or, as noted above, by transfection of small (21-23 nt) dsRNA (reviewed in Caplen, Trends Biotech. 20:49-51, 2002). Methods for modulating gene expression with RNAi are described, e.g., in U.S. Pat. No. 6,506,559 and US 2003/0056235, which are hereby incorporated by reference.

[0411] Standard molecular biology techniques can be used to generate siRNAs. Short interfering RNAs can be chemically synthesized, recombinantly produced, e.g., by expressing RNA from a template DNA, such as a plasmid, or obtained from commercial vendors, such as Dharmacon. The RNA used to mediate RNAi can include synthetic or modified nucleotides, such as phosphorothioate nucleotides. Methods of transfecting cells with siRNA or with plasmids engineered to make siRNA are routine in the art.

[0412] The siRNA molecules used to decrease expression of an IL6R, sIL6gp130, or IL-6 mRNA can vary in a number of ways. For example, they can include a 3′ hydroxyl group and strands of 21, 22, or 23 consecutive nucleotides. They can be blunt ended or include an overhanging end at either the 3′ end, the 5′ end, or both ends. For example, at least one strand of the RNA molecule can have a 3′ overhang from about 1 to about 6 nucleotides (e.g., 1-5, 1-3, 2-4, or 3-5 nucleotides (whether pyrimidine or purine nucleotides) in length. Where both strands include an overhang, the length of the overhangs may be the same or different for each strand.

[0413] To further enhance the stability of the RNA duplexes, the 3′ overhangs can be stabilized against degradation (by, e.g., including purine nucleotides, such as adenosine or guanosine nucleotides or replacing pyrimidine nucleotides by modified analogues (e.g., substitution of uridine 2-nucleotide 3′ overhangs by 2′-deoxythymidine is tolerated and does not affect the efficiency of RNAi). Any siRNA can be used in the methods of decreasing an IL6R, sIL6gp130, or IL-6 mRNA, provided it has sufficient homology to the target of interest (e.g., a sequence present in any one of SEQ ID NOs: 50-55, e.g., a target sequence encompassing the translation start site or the first exon of the mRNA). There is no upper limit on the length of the siRNA that can be used (e.g., the siRNA can range from about 21 base pairs of the gene to the full length of the gene or more (e.g., about 20 to about 30 base pairs, about 50 to about 60 base pairs, about 60 to about 70 base pairs, about 70 to about 80 base pairs, about 80 to about 90 base pairs, or about 90 to about 100 base pairs).

[0414] Non-limiting examples of short interfering RNA (siRNA) that are IL-6 receptor inhibitors are described in Yi et al., Int. J. Oncol. 41(1):310-316, 2012; and Shinriki et al., Clin. Can. Res. 15(17):5426-5434, 2009). Non-limiting examples of microRNAs that are IL-6 receptor inhibitors are described in miR34a (Li et al., Int. J. Clin. Exp. Pathol. 8(2):1364-1373, 2015) and miR-451 (Liu et al., Cancer Epidemiol. 38(1):85-92, 2014).

[0415] Non-limiting examples of aptamers that are IL-6 receptor inhibitors are described in Meyer et al., RNA Biol. 11(1):57-65, 2014; Meyer et al., RNA Biol. 9(1):67-80, 2012; and Mittelberger et al., RNA Biol. 12(9):1043-1053, 2015. Additional examples of inhibitory nucleic acids that are IL-6 receptor inhibitors are described in, e.g., WO 96/040157.

[0416] In certain embodiments, a therapeutically effective amount of an inhibitory nucleic acid targeting a nucleic acid encoding an IL6R, sIL6gp130, or IL-6 protein can be administered to a subject (e.g., a human subject) in need thereof.

[0417] In some embodiments, the inhibitory nucleic acid can be about 10 nucleotides to about 40 nucleotides (e.g., about 10 to about 30 nucleotides, about 10 to about 25 nucleotides, about 10 to about 20 nucleotides, about 10 to about 15 nucleotides, 10 nucleotides, 11 nucleotides, 12 nucleotides, 13 nucleotides, 14 nucleotides, 15 nucleotides, 16 nucleotides, 17 nucleotides, 18 nucleotides, 19 nucleotides, 20 nucleotides, 21 nucleotides, 22 nucleotides, 23 nucleotides, 24 nucleotides, 25 nucleotides, 26 nucleotides, 27 nucleotides, 28 nucleotides, 29 nucleotides, 30 nucleotides, 31 nucleotides, 32 nucleotides, 33 nucleotides, 34 nucleotides, 35 nucleotides, 36 nucleotides, 37 nucleotides, 38 nucleotides, 39 nucleotides, or 40 nucleotides) in length. One skilled in the art will appreciate that inhibitory nucleic acids may comprise at least one modified nucleic acid at either the 5′ or 3′end of DNA or RNA.

[0418] As is known in the art, the term “thermal melting point (Tm)” refers to the temperature, under defined ionic strength, pH, and inhibitory nucleic acid concentration, at which 50% of the inhibitory nucleic acids complementary to the target sequence hybridize to the target sequence at equilibrium. In some embodiments, an inhibitory nucleic acid can bind specifically to a target nucleic acid under stingent conditions, e.g., those in which the salt concentration is at least about 0.01 to 1.0 M Na ion concentration (or other salts) at pH 7.0 to 8.3 and the temperature is at least about 30° C. for short oligonucleotides (e.g., 10 to 50 nucleotide). Stringent conditions can also be achieved with the addition of destabilizing agents such as formamide.

[0419] In some embodiments of any of the inhibitory nucleic acids described herein, the inhibitory nucleic acid binds to a target nucleic acid (e.g., a nucleic acid encoding any one of IL6R, sIL6gp130, or IL-6) with a Tm of greater than 20° C., greater than 22° C., greater than 24° C., greater than 26° C., greater than 28° C., greater than 30° C., greater than 32° C., greater than 34° C., greater than 36° C., greater than 38° C., greater than 40° C., greater than 42° C., greater than 44° C., greater than 46° C., greater than 48° C., greater than 50° C., greater than 52° C., greater than 54° C., greater than 56° C., greater than 58° C., greater than 60° C., greater than 62° C., greater than 64° C., greater than 66° C., greater than 68° C., greater than 70° C., greater than 72° C., greater than 74° C., greater than 76° C., greater than 78° C., or greater than 80° C., e.g., as measured in phosphate buffered saline using a UV spectrophotometer.

[0420] In some embodiments of any of the inhibitor nucleic acids described herein, the inhibitory nucleic acid binds to a target nucleic acid (e.g., a nucleic acid encoding any one of IL6R, sIL6gp130, or IL-6) with a Tm of about 20° C. to about 80° C., about 78° C., about 76° C., about 74° C., about 72° C., about 70° C., about 68° C., about 66° C., about 64° C., about 62° C., about 60° C., about 58° C., about 56° C., about 54° C., about 52° C., about 50° C., about 48° C., about 46° C., about 44° C., about 42° C., about 40° C., about 38° C., about 36° C., about 34° C., about 32° C., about 30° C., about 28° C., about 26° C., about 24° C., or about 22° C. (inclusive); about 22° C. to about 80° C., about 78° C., about 76° C., about 74° C., about 72° C., about 70° C., about 68° C., about 66° C., about 64° C., about 62° C., about 60° C., about 58° C., about 56° C., about 54° C., about 52° C., about 50° C., about 48° C., about 46° C., about 44° C., about 42° C., about 40° C., about 38° C., about 36° C., about 34° C., about 32° C., about 30° C., about 28° C., about 26° C., or about 24° C. (inclusive); about 24° C. to about 80° C., about 78° C., about 76° C., about 74° C., about 72° C., about 70° C., about 68° C., about 66° C., about 64° C., about 62° C., about 60° C., about 58° C., about 56° C., about 54° C., about 52° C., about 50° C., about 48° C., about 46° C., about 44° C., about 42° C., about 40° C., about 38° C., about 36° C., about 34° C., about 32° C., about 30° C., about 28° C., or about 26° C. (inclusive); about 26° C. to about 80° C., about 78° C., about 76° C., about 74° C., about 72° C., about 70° C., about 68° C., about 66° C., about 64° C., about 62° C., about 60° C., about 58° C., about 56° C., about 54° C., about 52° C., about 50° C., about 48° C., about 46° C., about 44° C., about 42° C., about 40° C., about 38° C., about 36° C., about 34° C., about 32° C., about 30° C., or about 28° C. (inclusive); about 28° C. to about 80° C., about 78° C., about 76° C., about 74° C., about 72° C., about 70° C., about 68° C., about 66° C., about 64° C., about 62° C., about 60° C., about 58° C., about 56° C., about 54° C., about 52° C., about 50° C., about 48° C., about 46° C., about 44° C., about 42° C., about 40° C., about 38° C., about 36° C., about 34° C., about 32° C., or about 30° C. (inclusive); about 30° C. to about 80° C., about 78° C., about 76° C., about 74° C., about 72° C., about 70° C., about 68° C., about 66° C., about 64° C., about 62° C., about 60° C., about 58° C., about 56° C., about 54° C., about 52° C., about 50° C., about 48° C., about 46° C., about 44° C., about 42° C., about 40° C., about 38° C., about 36° C., about 34° C., or about 32° C. (inclusive); about 32° C. to about 80° C., about 78° C., about 76° C., about 74° C., about 72° C., about 70° C., about 68° C., about 66° C., about 64° C., about 62° C., about 60° C., about 58° C., about 56° C., about 54° C., about 52° C., about 50° C., about 48° C., about 46° C., about 44° C., about 42° C., about 40° C., about 38° C., about 36° C., or about 34° C. (inclusive); about 34° C. to about 80° C., about 78° C., about 76° C., about 74° C., about 72° C., about 70° C., about 68° C., about 66° C., about 64° C., about 62° C., about 60° C., about 58° C., about 56° C., about 54° C., about 52° C., about 50° C., about 48° C., about 46° C., about 44° C., about 42° C., about 40° C., about 38° C., or about 36° C. (inclusive); about 36° C. to about 80° C., about 78° C., about 76° C., about 74° C., about 72° C., about 70° C., about 68° C., about 66° C., about 64° C., about 62° C., about 60° C., about 58° C., about 56° C., about 54° C., about 52° C., about 50° C., about 48° C., about 46° C., about 44° C., about 42° C., about 40° C., or about 38° C. (inclusive); about 38° C. to about 80° C., about 78° C., about 76° C., about 74° C., about 72° C., about 70° C., about 68° C., about 66° C., about 64° C., about 62° C., about 60° C., about 58° C., about 56° C., about 54° C., about 52° C., about 50° C., about 48° C., about 46° C., about 44° C., about 42° C., or about 40° C. (inclusive); about 40° C. to about 80° C., about 78° C., about 76° C., about 74° C., about 72° C., about 70° C., about 68° C., about 66° C., about 64° C., about 62° C., about 60° C., about 58° C., about 56° C., about 54° C., about 52° C., about 50° C., about 48° C., about 46° C., about 44° C., or about 42° C. (inclusive); about 42° C. to about 80° C., about 78° C., about 76° C., about 74° C., about 72° C., about 70° C., about 68° C., about 66° C., about 64° C., about 62° C., about 60° C., about 58° C., about 56° C., about 54° C., about 52° C., about 50° C., about 48° C., about 46° C., or about 44° C. (inclusive); about 44° C. to about 80° C., about 78° C., about 76° C., about 74° C., about 72° C., about 70° C., about 68° C., about 66° C., about 64° C., about 62° C., about 60° C., about 58° C., about 56° C., about 54° C., about 52° C., about 50° C., about 48° C., or about 46° C. (inclusive); about 46° C. to about 80° C., about 78° C., about 76° C., about 74° C., about 72° C., about 70° C., about 68° C., about 66° C., about 64° C., about 62° C., about 60° C., about 58° C., about 56° C., about 54° C., about 52° C., about 50° C., or about 48° C. (inclusive); about 48° C. to about 80° C., about 78° C., about 76° C., about 74° C., about 72° C., about 70° C., about 68° C., about 66° C., about 64° C., about 62° C., about 60° C., about 58° C., about 56° C., about 54° C., about 52° C., or about 50° C. (inclusive); about 50° C. to about 80° C., about 78° C., about 76° C., about 74° C., about 72° C., about 70° C., about 68° C., about 66° C., about 64° C., about 62° C., about 60° C., about 58° C., about 56° C., about 54° C., or about 52° C. (inclusive); about 52° C. to about 80° C., about 78° C., about 76° C., about 74° C., about 72° C., about 70° C., about 68° C., about 66° C., about 64° C., about 62° C., about 60° C., about 58° C., about 56° C., or about 54° C. (inclusive); about 54° C. to about 80° C., about 78° C., about 76° C., about 74° C., about 72° C., about 70° C., about 68° C., about 66° C., about 64° C., about 62° C., about 60° C., about 58° C., or about 56° C. (inclusive); about 56° C. to about 80° C., about 78° C., about 76° C., about 74° C., about 72° C., about 70° C., about 68° C., about 66° C., about 64° C., about 62° C., about 60° C., or about 58° C. (inclusive); about 58° C. to about 80° C., about 78° C., about 76° C., about 74° C., about 72° C., about 70° C., about 68° C., about 66° C., about 64° C., about 62° C., or about 60° C. (inclusive); about 60° C. to about 80° C., about 78° C., about 76° C., about 74° C., about 72° C., about 70° C., about 68° C., about 66° C., about 64° C., or about 62° C. (inclusive); about 62° C. to about 80° C., about 78° C., about 76° C., about 74° C., about 72° C., about 70° C., about 68° C., about 66° C., or about 64° C. (inclusive); about 64° C. to about 80° C., about 78° C., about 76° C., about 74° C., about 72° C., about 70° C., about 68° C., or about 66° C. (inclusive); about 66° C. to about 80° C., about 78° C., about 76° C., about 74° C., about 72° C., about 70° C., or about 68° C. (inclusive); about 68° C. to about 80° C., about 78° C., about 76° C., about 74° C., about 72° C., or about 70° C. (inclusive); about 70° C. to about 80° C., about 78° C., about 76° C., about 74° C., or about 72° C. (inclusive); about 72° C. to about 80° C., about 78° C., about 76° C., or about 74° C. (inclusive); about 74° C. to about 80° C., about 78° C., or about 76° C. (inclusive); about 76° C. to about 80° C. or about 78° C. (inclusive); or about 78° C. to about 80° C. (inclusive),

[0421] In some embodiments, the inhibitory nucleic acid can be formulated in a nanoparticle (e.g., a nanoparticle including one or more synthetic polymers, e.g., Patil et al., Pharmaceutical Nanotechnol. 367:195-203, 2009; Yang et al., ACS Appl. Mater. Interfaces, doi: 10.1021/acsami.6b16556, 2017; Perepelyuk et al., Mol. Ther. Nucleic Acids 6:259-268, 2017). In some embodiments, the nanoparticle can be a mucoadhesive particle (e.g., nanoparticles having a positively-charged exterior surface) (Andersen et al., Methods Mol. Biol. 555:77-86, 2009). In some embodiments, the nanoparticle can have a neutrally-charged exterior surface.

[0422] In some embodiments, the inhibitory nucleic acid can be formulated, e.g., as a liposome (Buyens et al., J. Control Release 158(3): 362-370, 2012; Scarabel et al., Expert Opin. Drug Deliv. 17:1-14, 2017), a micelle (e.g., a mixed micelle) (Tangsangasaksri et al., BioMacromolecules 17:246-255, 2016; Wu et al., Nanotechnology, doi: 10.1088/1361-6528/aa6519, 2017), a microemulsion (WO 11/004395), a nanoemulsion, or a solid lipid nanoparticle (Sahay et al., Nature Biotechnol. 31:653-658, 2013; and Lin et al., Nanomedicine 9(1):105-120, 2014). Additional exemplary structural features of inhibitory nucleic acids and formulations of inhibitory nucleic acids are described in US 2016/0090598.

[0423] In some embodiments, a pharmaceutical composition can include a sterile saline solution and one or more inhibitory nucleic acid (e.g., any of the inhibitory nucleic acids described herein). In some examples, a pharmaceutical composition consists of a sterile saline solution and one or more inhibitory nucleic acid (e.g., any of the inhibitory nucleic acids described herein). In certain embodiments, the sterile saline is a pharmaceutical grade saline. In certain embodiments, a pharmaceutical composition can include one or more inhibitory nucleic acid (e.g., any of the inhibitory nucleic acids described herein) and sterile water. In certain embodiments, a pharmaceutical composition consists of one or more inhibitory nucleic acid (e.g., any of the inhibitory nucleic acids described herein) and sterile water. In certain embodiments, a pharmaceutical composition includes one or more inhibitory nucleic acid (e.g., any of the inhibitory nucleic acids described herein) and phosphate-buffered saline (PBS). In certain embodiments, a pharmaceutical composition consists of one or more inhibitory nucleic acids (e.g., any of the inhibitory nucleic acids described herein) and sterile phosphate-buffered saline (PBS). In some examples, the sterile saline is a pharmaceutical grade PBS.

[0424] In certain embodiments, one or more inhibitory nucleic acids (e.g., any of the inhibitory nucleic acids described herein) may be admixed with pharmaceutically acceptable active and/or inert substances for the preparation of pharmaceutical compositions or formulations. Compositions and methods for the formulation of pharmaceutical compositions depend on a number of criteria, including, but not limited to, route of administration, extent of disease, or dose to be administered.

[0425] Pharmaceutical compositions including one or more inhibitory nucleic acids encompass any pharmaceutically acceptable salts, esters, or salts of such esters. Non-limiting examples of pharmaceutical compositions include pharmaceutically acceptable salts of inhibitory nucleic acids. Suitable pharmaceutically acceptable salts include, but are not limited to, sodium and potassium salts.

[0426] Also provided herein are prodrugs that can include additional nucleosides at one or both ends of an inhibitory nucleic acid which are cleaved by endogenous nucleases within the body, to form the active inhibitory nucleic acid.

[0427] Lipid moieties can be used to formulate an inhibitory nucleic acid. In certain such methods, the inhibitory nucleic acid is introduced into preformed liposomes or lipoplexes made of mixtures of cationic lipids and neutral lipids. In certain methods, inhibitory nucleic acid complexes with mono- or poly-cationic lipids are formed without the presence of a neutral lipid. In certain embodiments, a lipid moiety is selected to increase distribution of an inhibitory nucleic acid to a particular cell or tissue in a mammal. In some examples, a lipid moiety is selected to increase distribution of an inhibitory nucleic acid to fat tissue in a mammal. In certain embodiments, a lipid moiety is selected to increase distribution of an inhibitory nucleic acid to muscle tissue.

[0428] In certain embodiments, pharmaceutical compositions provided herein comprise one or more inhibitory nucleic acid and one or more excipients. In certain such embodiments, excipients are selected from water, salt solutions, alcohol, polyethylene glycols, gelatin, lactose, amylase, magnesium stearate, talc, silicic acid, viscous paraffin, hydroxymethylcellulose and polyvinylpyrrolidone.

[0429] In some examples, a pharmaceutical composition provided herein includes liposomes and emulsions. Liposomes and emulsions can be used to formulate hydrophobic compounds. In some examples, certain organic solvents such as dimethylsulfoxide are used.

[0430] In some examples, a pharmaceutical composition provided herein includes one or more tissue-specific delivery molecules designed to deliver one or more inhibitory nucleic acids to specific tissues or cell types in a mammal. For example, a pharmaceutical composition can include liposomes coated with a tissue-specific antibody.

[0431] In some embodiments, a pharmaceutical composition provided herein can include a co-solvent system. Examples of such co-solvent systems include benzyl alcohol, a nonpolar surfactant, a water-miscible organic polymer, and an aqueous phase. A non-limiting example of such a co-solvent system is the VPD co-solvent system, which is a solution of absolute ethanol comprising 3% w/v benzyl alcohol, 8% w/v of the nonpolar surfactant Polysorbate 80™ and 65% w/v polyethylene glycol 300. As can be appreciated, other surfactants may be used instead of Polysorbate 80™; the fraction size of polyethylene glycol may be varied; other biocompatible polymers may replace polyethylene glycol, e.g., polyvinyl pyrrolidone; and other sugars or polysaccharides may substitute for dextrose.

[0432] In some examples, a pharmaceutical composition can be formulated for oral administration. In some examples, pharmaceutical compositions are formulated for buccal administration.

[0433] In some examples, a pharmaceutical composition is formulated for administration by injection (e.g., intravenous, subcutaneous, intramuscular, etc.). In some of these embodiments, a pharmaceutical composition includes a carrier and is formulated in aqueous solution, such as water or physiologically compatible buffers such as Hanks's solution, Ringer's solution, or physiological saline buffer. In some examples, other ingredients are included (e.g., ingredients that aid in solubility or serve as preservatives). In some examples, injectable suspensions are prepared using appropriate liquid carriers, suspending agents, and the like. Some pharmaceutical compositions for injection are formulated in unit dosage form, e.g., in ampoules or in multi-dose containers. Some pharmaceutical compositions for injection are suspensions, solutions, or emulsions in oily or aqueous vehicles, and may contain formulatory agents such as suspending, stabilizing, and/or dispersing agents. Solvents suitable for use in pharmaceutical compositions for injection include, but are not limited to, lipophilic solvents and fatty oils, such as sesame oil, synthetic fatty acid esters, such as ethyl oleate or triglycerides, and liposomes.

### Antibodies

[0434] In some embodiments, the IL-6 receptor inhibitor is an antibody or an antigen-binding fragment thereof (e.g., a Fab or a scFv). In some embodiments, an antibody or antigen-binding fragment described herein binds specifically to IL-6. In some embodiments, an antibody or antigen-binding fragment described herein binds specifically to IL-6 receptor (e.g., one or both of IL6R and sIL6gp130).

[0435] In some embodiments, the antibody can be a humanized antibody, a chimeric antibody, a multivalent antibody, or a fragment thereof. In some embodiments, an antibody can be a scFv-Fc, a V_{H}H domain, a V_{NAR} domain, a (scFv)₂, a minibody, or a BiTE. In some embodiments, an antibody can be a DVD-Ig, and a dual-affinity re-targeting antibody (DART), a triomab, kih IgG with a common LC, a crossmab, an ortho-Fab IgG, a 2-in-1-IgG, IgG-ScFv, scFv₂-Fc, a bi-nanobody, tanden antibody, a DART-Fc, a scFv-HAS-scFv, DNL-Fab3, DAF (two-in-one or four-in-one), DutaMab, DT-IgG, knobs-in-holes common LC, knobs-in-holes assembly, charge pair antibody, Fab-arm exchange antibody, SEEDbody, Triomab, LUZ-Y, Fcab, kλ-body, orthogonal Fab, DVD-IgG, IgG(H)-scFv, scFv-(H)IgG, IgG(L)-scFv, scFv-(L)-IgG, IgG (L,H)-Fc, IgG(H)-V, V(H)—IgG, IgG(L)-V, V(L)-IgG, KIH IgG-scFab, 2scFv-IgG, IgG-2scFv, scFv4-Ig, Zybody, DVI-IgG, nanobody, nanobody-HSA, a diabody, a TandAb, scDiabody, scDiabody-CH3, Diabody-CH3, Triple Body, miniantibody, minibody, TriBi minibody, scFv-CH3 KIH, Fab-scFv, scFv-CH-CL-scFv, F(ab′)₂-scFV₂, scFv-KIH, Fab-scFv-Fc, tetravalent HCAb, scDiabody-Fc, diabody-Fc, tandem scFv-Fc, intrabody, dock and lock bispecific antibody, ImmTAC, HSAbody, scDiabody-HAS, tandem scFv, IgG-IgG, Cov-X-Body, and scFv1-PEG-scFv2.

[0436] Non-limiting examples of an antigen-binding fragment of an antibody include an Fv fragment, a Fab fragment, a F(ab′)2 fragment, and a Fab′ fragment. Additional examples of an antigen-binding fragment of an antibody is an antigen-binding fragment of an IgG (e.g., an antigen-binding fragment of IgG1, IgG2, IgG3, or IgG4) (e.g., an antigen-binding fragment of a human or humanized IgG, e.g., human or humanized IgG1, IgG2, IgG3, or IgG4); an antigen-binding fragment of an IgA (e.g., an antigen-binding fragment of IgA1 or IgA2) (e.g., an antigen-binding fragment of a human or humanized IgA, e.g., a human or humanized IgA1 or IgA2); an antigen-binding fragment of an IgD (e.g., an antigen-binding fragment of a human or humanized IgD); an antigen-binding fragment of an IgE (e.g., an antigen-binding fragment of a human or humanized IgE); or an antigen-binding fragment of an IgM (e.g., an antigen-binding fragment of a human or humanized IgM).

[0437] In some embodiments, the antibody is a humanized antibody, a chimeric antibody, a multivalent antibody, or a fragment thereof. In some embodiments, the antibody is a monoclonal antibody. In some embodiments, the antibody is a humanized monoclonal antibody. See e.g., Hunter & Jones, Nat. Immunol. 16:448-457, 2015; Heo et al., Oncotarget 7(13):15460-15473, 2016. Additional examples of antibodies and antigen-binding fragments thereof are described in U.S. Pat. Nos. 8,440,196; 7,842,144; 8,034,344; and 8,529,895; US 2013/0317203; US 2014/0322239; US 2015/0166666; US 2016/0152714; and US 2017/0002082, each of which is incorporated by reference in its entirety.

[0438] In certain embodiments, the antibody comprises or consists of an antigen-binding fragment or portion of tocilizumab (artlizumab, Actemra®; Sebba, Am. J. Health Syst. Pharm. 65(15):1413-1418, 2008; Tanaka et al., FEBS Letters 585(23):3699-3709, 2011; Nishimoto et al., Arthritis Rheum. 50:1761-1769, 2004; Yokota et al., Lancet 371(9617):998-1006, 2008; Emery et al., Ann. Rheum. Dis. 67(11):1516-1523, 2008; Roll et al., Arthritis Rheum. 63(5):1255-1264, 2011); lazakizumab (BMS945429; ALD518, a humanized monoclonal antibody that binds circulating IL-6 cytokine rather than the IL-6 receptor, blocking both classic signaling and trans-signaling (Weinblatt, Michael E., et al. “The Efficacy and Safety of Subcutaneous Clazakizumab in Patients With Moderate-to-Severe Rheumatoid Arthritis and an Inadequate Response to Methotrexate: Results From a Multinational, Phase IIb, Randomized, Double-Blind, Placebo/Active-Controlled, Dose-Ranging Study.” Arthritis & Rheumatology 67.10 (2015): 2591-2600.)); sarilumab (REGN88 or SAR153191; Huizinga et al., Ann. Rheum. Dis. 73(9):1626-1634, 2014; Sieper et al., Ann. Rheum. Dis. 74(6):1051-1057, 2014; Cooper, Immunotherapy 8(3): 249-250, 2016); MR-16 (Hartman et al., PLosOne 11(12):e0167195, 2016; Fujita et al., Biochim. Biophys. Acta. 10:3170-80, 2014; Okazaki et al., Immunol. Lett. 84(3):231-40, 2002; Noguchi-Sasaki et al., BMC Cancer 16:270, 2016; Ueda et al., Sci. Rep. 3:1196, 2013); rhPM-1 (MRA; Nishimoto et al., Blood 95: 56-61, 2000; Nishimoto et al., Blood 106: 2627-2632, 2005; Nakahara et al., Arthritis Rheum. 48(6): 1521-1529, 2003); NI-1201 (Lacroix et al., J. Biol. Chem. 290(45):26943-26953, 2015); EBI-029 (Schmidt et al., Eleven Biotherapeutics Poster # B0200, 2014). In some embodiments, the antibody is a nanobody (e.g., ALX-0061 (Van Roy et al., Arthritis Res. Ther. 17: 135, 2015; Kim et al., Arch. Pharm. Res. 38(5):575-584, 2015)). In some embodiments, the antibody is NRI or a variant thereof (Adachi et al., Mol. Ther. 11(1):5262-263, 2005; Hoshino et al., Can. Res. 67(3): 871-875, 2007). In some embodiments, the antibody is PF-04236921 (Pfizer) (Wallace et al., Ann. Rheum. Dis. 76(3):534-542, 2017).

[0439] In some embodiments, any of the antibodies or antigen-binding fragments described herein has a dissociation constant (K_{D}) of less than 1×10⁻⁵ M (e.g., less than 0.5×10⁻⁵ M, less than 1×10⁻⁶ M, less than 0.5×10⁻⁶ M, less than 1×10⁻⁷ M, less than 0.5×10⁻⁷ M, less than 1×10⁻⁸ M, less than 0.5×10⁻⁸ M, less than 1×10⁻⁹ M, less than 0.5×10⁻⁹ M, less than 1×10⁻¹⁰ M, less than 0.5×10⁻¹⁰ M, less than 1×10⁻¹¹ M, less than 0.5×10⁻¹¹ M, or less than 1×10⁻¹²M), e.g., as measured in phosphate buffered saline using surface plasmon resonance (SPR).

[0440] In some embodiments, any of the antibodies or antigen-binding fragments described herein has a K_{D} of about 1×10⁻¹² M to about 1×10⁻⁵ M, about 0.5×10⁻⁵ M, about 1×10⁻⁶ M, about 0.5×10⁻⁶ M, about 1×10⁻⁷ M, about 0.5×10⁻⁷ M, about 1×10⁻⁸ M, about 0.5×10⁻⁸ M, about 1×10⁻⁹ M, about 0.5×10⁻⁹ M, about 1×10⁻¹⁰ M, about 0.5×10⁻¹⁰ M, about 1×10⁻¹¹ M, or about 0.5×10⁻¹¹ M (inclusive); about 0.5×10⁻¹¹ M to about 1×10⁻⁵ M, about 0.5×10⁻⁵ M, about 1×10⁻⁶ M, about 0.5×10⁻⁶ M, about 1×10⁻⁷ M, about 0.5×10⁻⁷ M, about 1×10⁻⁸ M, about 0.5×10⁻⁸ M, about 1×10⁻⁹ M, about 0.5×10⁻⁹ M, about 1×10⁻¹⁰ M, about 0.5×10⁻¹⁰ M, or about 1×10⁻¹¹ M (inclusive); about 1×10⁻¹¹ M to about 1×10⁻⁵ M, about 0.5×10⁻⁵ M, about 1×10⁻⁶ M, about 0.5×10⁻⁶ M, about 1×10⁻⁷ M, about 0.5×10⁻⁷ M, about 1×10⁻⁸ M, about 0.5×10⁻⁸ M, about 1×10⁻⁹M, about 0.5×10⁻⁹ M, about 1×10⁻¹⁰M, or about 0.5×10⁻¹⁰ M (inclusive); about 0.5×10⁻¹⁰ M to about 1×10⁻⁵ M, about 0.5×10⁻⁵ M, about 1×10⁻⁵ M, about 0.5×10⁻⁶ M, about 1×10⁻⁷ M, about 0.5×10⁻⁷ M, about 1×10⁻⁸ M, about 0.5×10⁻⁸ M, about 1×10⁻⁹ M, about 0.5×10⁻⁹ M, or about 1×10⁻¹⁰ M (inclusive); about 1×10⁻¹⁰ M to about 1×10⁻⁵ M, about 0.5×10⁻⁵ M, about 1×10⁻⁶ M, about 0.5×10⁻⁶ M, about 1×10⁻⁷ M, about 0.5×10⁻⁷ M, about 1×10−8 M, about 0.5×10−8 M, about 1×10⁻⁹ M, or about 0.5×10⁻⁹ M (inclusive); about 0.5×10⁻⁹ M to about 1×10⁻⁵ M, about 0.5×10⁻⁵ M, about 1×10⁻⁶ M, about 0.5×10⁻⁶ M, about 1×10⁻⁷ M, about 0.5×10⁻⁷ M, about 1×10⁻⁸ M, about 0.5×10⁻⁸ M, or about 1×10⁻⁹ M (inclusive); about 1×10⁻⁹ M to about 1×10⁻⁵ M, about 0.5×10⁻⁵ M, about 1×10⁻⁶ M, about 0.5×10⁻⁶ M, about 1×10⁻⁷ M, about 0.5×10⁻⁷ M, about 1×10⁻⁸ M, or about 0.5×10⁻⁸ M (inclusive); about 0.5×10⁻⁸ M to about 1×10⁻⁵ M, about 0.5×10⁻⁵ M, about 1×10⁻⁶ M, about 0.5×10⁻⁶ M, about 1×10⁻⁷ M, about 0.5×10⁻⁷ M, or about 1×10⁻⁸ M (inclusive); about 1×10⁻⁸ M to about 1×10⁻⁵ M, about 0.5×10⁻⁵ M, about 1×10⁻⁶ M, about 0.5×10⁻⁶ M, about 1×10⁻⁷ M, or about 0.5×10⁻⁷ M (inclusive); about 0.5×10⁻⁷ M to about 1×10⁻⁵ M, about 0.5×10⁻⁵ M, about 1×10⁻⁶ M, about 0.5×10⁻⁶ M, or about 1×10⁻⁷ M (inclusive); about 1×10⁻⁷ M to about 1×10⁻⁵ M, about 0.5×10⁻⁵ M, about 1×10⁻⁶ M, or about 0.5×10⁻⁶ M (inclusive); about 0.5×10⁻⁶ M to about 1×10⁻⁵ M, about 0.5×10⁻⁵ M, or about 1×10⁻⁶ M (inclusive); about 1×10⁻⁶ M to about 1×10⁻⁵ M or about 0.5×10⁻⁵ M (inclusive); or about 0.5×10⁻⁵ M to about 1×10⁻⁵ M (inclusive), e.g., as measured in phosphate buffered saline using surface plasmon resonance (SPR).

[0441] In some embodiments, any of the antibodies or antigen-binding fragments described herein has a K_{off} of about 1×10⁻⁶ s⁻¹ to about 1×10⁻³ s⁻¹, about 0.5×10⁻³ s⁻¹, about 1×10⁻⁴ s⁻¹, about 0.5×10⁻⁴ s⁻¹, about 1×10⁻⁵ s⁻¹, or about 0.5×10⁻⁵ s⁻¹ (inclusive); about 0.5×10⁻⁵ s⁻¹ to about 1×10⁻³ s⁻¹, about 0.5×10⁻³ s⁻¹, about 1×10⁻⁴ s⁻¹, about 0.5×10⁻⁴ s⁻¹, or about 1×10⁻⁵ s⁻¹ (inclusive); about 1×10⁻⁵ s⁻¹ to about 1×10⁻³ s⁻¹, about 0.5×10⁻³ s⁻¹, about 1×10⁻⁴ s⁻¹, or about 0.5×10⁻⁴ s⁻¹ (inclusive); about 0.5×10⁻⁴ s⁻¹ to about 1×10⁻³ s⁻¹, about 0.5×10⁻³ s⁻¹, or about 1×10⁻⁴ s⁻¹ (inclusive); about 1×10⁻⁴ s⁻¹ to about 1×10⁻³ s⁻¹, or about 0.5×10⁻³ s⁻¹ (inclusive); or about 0.5×10⁻⁵ s⁻¹ to about 1×10⁻³ s⁻¹ (inclusive), e.g., as measured in phosphate buffered saline using surface plasmon resonance (SPR).

[0442] In some embodiments, any of the antibodies or antigen-binding fragments described herein has a Kₒₙ of about 1×10² M⁻¹s⁻¹ to about 1×10⁶ M⁻¹s⁻¹, about 0.5×10⁶ M^{-I}s⁻¹, about 1×10⁵ M⁻¹s⁻¹, about 0.5×10⁵ M⁻ⁱs⁻¹, about 1×10⁴ M⁻¹s⁻¹, about 0.5×10⁴ M⁻¹s⁻¹, about 1×10³ M⁻¹s⁻¹, or about 0.5×10³ M⁻ⁱs⁻¹ (inclusive); about 0.5×10³ M⁻¹s⁻¹ to about 1×10⁶ M⁻¹s⁻¹, about 0.5×10⁶ M⁻¹s⁻¹, about 1×10⁵ M⁻¹s⁻¹, about 0.5×10⁵ M⁻¹s⁻¹, about 1×10⁴ M⁻¹s⁻¹, about 0.5×10⁴ M⁻¹s⁻¹, or about 1×10³ M⁻¹s⁻¹ (inclusive); about 1×10³ M⁻¹s⁻¹ to about 1×10⁶M⁻¹s⁻¹, about 0.5×10⁶ M⁻¹s⁻¹, about 1×10⁵ M⁻¹s⁻¹, about 0.5×10⁵ M⁻¹s⁻¹, about 1×10⁴ M⁻¹s⁻¹, or about 0.5×10⁴ M⁻¹s⁻¹ (inclusive); about 0.5×10⁴ M⁻¹s⁻¹ to about 1×10⁶ M⁻¹s⁻¹, about 0.5×10⁶ M⁻¹s⁻¹, about 1×10⁵ M⁻¹s⁻¹, about 0.5×10⁵ M⁻¹s⁻¹, or about 1×10⁴ M⁻¹s⁻¹ (inclusive); about 1×10⁴ M⁻¹s⁻¹ to about 1×10⁶ M⁻¹s⁻¹, about 0.5×10⁶ M⁻¹s⁻¹, about 1×10⁵ M⁻¹s⁻¹, or about 0.5×10⁵ M⁻¹s⁻¹ (inclusive); about 0.5×10⁵ M⁻¹s⁻¹ to about 1×10⁶ M⁻¹s⁻¹, about 0.5×10⁶ M⁻¹s⁻¹, or about 1×10⁵ M⁻¹s⁻¹ (inclusive); about 1×10⁵ M⁻¹s⁻¹ to about 1×10⁶ M⁻¹s⁻¹, or about 0.5×10⁶ M⁻¹s⁻¹ (inclusive); or about 0.5×10⁶ M⁻¹s⁻¹ to about 1×10⁶ M⁻¹s⁻¹ (inclusive), e.g., as measured in phosphate buffered saline using surface plasmon resonance (SPR).

### Fusion Proteins

[0443] In some embodiments, the IL-6 receptor inhibitor is a fusion protein, a soluble receptor, or a peptide (see e.g., U.S. Pat. No. 5,591,827). In some embodiments, the IL-6 receptor fusion protein comprises or consists of soluble gp130 (Jostock et al., Eur. J. Biochem. 268(1):160-167, 2001; Richards et al., Arthritis Rheum. 54(5):1662-1672, 2006; Rose-John et al., Exp. Opin. Ther. Targets 11(5):613-624, 2007).

[0444] In some embodiments, the IL-6 receptor fusion protein comprises or consists of FE999301 (Jostock et al., Eur. J. Biochem. 268(1):160-167, 2001) or sgp130Fc protein (Jones et al., J. Clin. Invest. 121(9):3375-3383, 2011). In some embodiments, the IL-6 receptor inhibitor is a peptide (e.g., S7 (Su et al., Cancer Res. 65(11):4827-4835, 2005). In some embodiments, the IL-6 receptor inhibitor is a triterpenoid saponin (e.g., chikusetsuaponin IVa butyl ester (CS-Iva-Be) (Yang et al., Mol. Cancer. Ther. 15(6):1190-200, 2016).

### Small Molecules

[0445] In some embodiments, the IL-6 receptor inhibitor is a small molecule (see, e.g., U.S. Pat. No. 9,409,990). In some embodiments, the small molecule is LMT-28 (Hong et al., J. Immunol. 195(1): 237-245, 2015); ERBA (Enomoto et al., Biochem. Biophys. Res. Commun. 323:1096-1102, 2004; Boos et al., J. Nat. Prod. 75(4):661-668, 2012), ERBF (TB-2-081) (Hayashi et al., J. Pharmacol. Exp. Ther. 303:104-109, 2002; Vardanyan et al., Pain 151(2):257-265, 2010; Kino et al., J. Allergy Clin. Immunol. 120(2):437-444, 2007), or a variant thereof.

### Immune Modulatory Agents

[0446] As used herein, the term “immune modulatory agentomodifier” refers to an agent that is a CD40/CD40 inhibitor (as defined herein), a CD3 inhibitor (as defined herein), a CD14 inhibitor (as defined agent), a CD20 inhibitor (as defined herein), a CD25 inhibitor (as defined herein), a CD28 inhibitor (as defined herein), a CD49 inhibitor (as defined herein), or a CD89 inhibitor. Examples of immune modulatory agents are described herein. Additional examples of immune modulatory agents are known in the art.

### CD40/CD40L Inhibitors

[0447] The term “CD40/CD40L inhibitors” refers to an agent which decreases CD40 or CD40L (CD154) expression and/or the ability of CD40 to bind to CD40L (CD154). CD40 is a costimulatory receptor that binds to its ligand, CD40L (CD154).

[0448] In some embodiments, the CD40/CD40L inhibitor can decrease the binding between CD40 and CD40L by blocking the ability of CD40 to interact with CD40L. In some embodiments, the CD40/CD40L inhibitor can decrease the binding between CD40 and CD40L by blocking the ability of CD40L to interact with CD40. In some embodiments, the CD40/CD40L inhibitor decreases the expression of CD40 or CD40L. In some embodiments, the CD40/CD40L inhibitor decreases the expression of CD40. In some embodiments, the CD40/CD40L inhibitor decreases the expression of CD40L.

[0449] In some embodiments, the CD40/CD40L inhibitor is an inhibitory nucleic acid, an antibody or an antigen-binding fragment thereof, a fusion protein, or a small molecule. In some embodiments, the inhibitory nucleic acid is a small interfering RNA, an antisense nucleic acid, an aptamer, or a microRNA. Exemplary CD40/CD40L inhibitors are described herein. Additional examples of CD40/CD40L inhibitors are known in the art.

[0450] Exemplary aspects of different inhibitory nucleic acids are described below. Any of the examples of inhibitory nucleic acids that can decrease expression of CD40 or CD40L mRNA in a mammalian cell can be synthesized in vitro. Inhibitory nucleic acids that can decrease the expression of CD40 or CD40L mRNA in a mammalian cell include antisense nucleic acid molecules, i.e., nucleic acid molecules whose nucleotide sequence is 15 complementary to all or part of a CD40 or CD40L mRNA (e.g., complementary to all or a part of any one of SEQ ID NOs: 56-61).

| Human CD40 mRNA (Variant 1) NM_001250.5 | |
|---|---|
| (SEQ ID NO: 56) | |
| 1 | tttcctgggc ggggccaagg ctggggcagg ggagtcagca gaggcctcgc tcgggcgccc |
| 61 | agtggtcctg ccgcctggtc tcacctcgct atggttcgtc tgcctctgca gtgcgtcctc |
| 121 | tggggctgct tgctgaccgc tgtccatcca gaaccaccca ctgcatgcag agaaaaacag |
| 181 | tacctaataa acagtcagtg ctgttctttg tgccagccag gacagaaact ggtgagtgac |
| 241 | tgcacagagt tcactgaaac ggaatgcctt ccttgcggtg aaagcgaatt cctagacacc |
| 301 | tggaacagag agacacactg ccaccagcac aaatactgcg accccaacct agggcttcgg |
| 361 | gtccagcaga agggcacctc agaaacagac accatctgca cctgtgaaga aggctggcac |
| 421 | tgtacgagtg aggcctgtga gagctgtgtc ctgcaccgct catgctcgcc cggctttggg |
| 481 | gtcaagcaga ttgctacagg ggtttctgat accatctgcg agccctgccc agtcggcttc |
| 541 | ttctccaatg tgtcatctgc tttcgaaaaa tgtcaccctt ggacaagctg tgagaccaaa |
| 601 | gacctggttg tgcaacaggc aggcacaaac aagactgatg ttgtctgtgg tccccaggat |
| 661 | cggctgagag ccctggtggt gatccccatc atcttcggga tcctgtttgc catcctcttg |
| 721 | gtgctggtct ttatcaaaaa ggtggccaag aagccaacca ataaggcccc ccaccccaag |
| 781 | caggaacccc aggagatcaa ttttcccgac gatcttcctg gctccaacac tgctgctcca |
| 841 | gtgcaggaga ctttacatgg atgccaaccg gtcacccagg aggatggcaa agagagtcgc |
| 901 | atctcagtgc aggagagaca gtgaggctgc acccacccag gagtgtggcc acgtgggcaa |
| 961 | acaggcagtt ggccagagag cctggtgctg ctgctgctgt ggcgtgaggg tgaggggctg |
| 1021 | gcactgactg ggcatagctc cccgcttctg cctgcacccc tgcagtttga gacaggagac |
| 1081 | ctggcactgg atgcagaaac agttcacctt gaagaacctc tcacttcacc ctggagccca |
| 1141 | tccagtctcc caacttgtat taaagacaga ggcagaagtt tggtggtggt ggtgttgggg |
| 1201 | tatggtttag taatatccac cagaccttcc gatccagcag tttggtgccc agagaggcat |
| 1261 | catggtggct tccctgcgcc caggaagcca tatacacaga tgcccattgc agcattgttt |
| 1321 | gtgatagtga acaactggaa gctgcttaac tgtccatcag caggagactg gctaaataaa |
| 1381 | attagaatat atttatacaa cagaatctca aaaacactgt tgagtaagga aaaaaaggca |
| 1441 | tgctgctgaa tgatgggtat ggaacttttt aaaaaagtac atgcttttat gtatgtatat |
| 1501 | tgcctatgga tatatgtata aatacaatat gcatcatata ttgatataac aagggttctg |
| 1561 | gaagggtaca cagaaaaccc acagctcgaa gagtggtgac gtctggggtg gggaagaagg |
| 1621 | gtctggggg |
| Human CD40 mRNA (Variant 2) NM_152854.3 | |
| (SEQ ID NO: 57) | |
| 1 | tttcctgggc ggggccaagg ctggggcagg ggagtcagca gaggcctcgc tcgggcgccc |
| 61 | agtggtcctg ccgcctggtc tcacctcgct atggttcgtc tgcctctgca gtgcgtcctc |
| 121 | tggggctgct tgctgaccgc tgtccatcca gaaccaccca ctgcatgcag agaaaaacag |
| 181 | tacctaataa acagtcagtg ctgttctttg tgccagccag gacagaaact ggtgagtgac |
| 241 | tgcacagagt tcactgaaac ggaatgcctt ccttgcggtg aaagcgaatt cctagacacc |
| 301 | tggaacagag agacacactg ccaccagcac aaatactgcg accccaacct agggcttcgg |
| 361 | gtccagcaga agggcacctc agaaacagac accatctgca cctgtgaaga aggctggcac |
| 421 | tgtacgagtg aggcctgtga gagctgtgtc ctgcaccgct catgctcgcc cggctttggg |
| 481 | gtcaagcaga ttgctacagg ggtttctgat accatctgcg agccctgccc agtcggcttc |
| 541 | ttctccaatg tgtcatctgc tttcgaaaaa tgtcaccctt ggacaaggtc cccaggatcg |
| 601 | gctgagagcc ctggtggtga tccccatcat cttcgggatc ctgtttgcca tcctcttggt |
| 661 | gctggtcttt atcaaaaagg tggccaagaa gccaaccaat aaggcccccc accccaagca |
| 721 | ggaaccccag gagatcaatt ttcccgacga tcttcctggc tccaacactg ctgctccagt |
| 781 | gcaggagact ttacatggat gccaaccggt cacccaggag gatggcaaag agagtcgcat |
| 841 | ctcagtgcag gagagacagt gaggctgcac ccacccagga gtgtggccac gtgggcaaac |
| 901 | aggcagttgg ccagagagcc tggtgctgct gctgctgtgg cgtgagggtg aggggctggc |
| 961 | actgactggg catagctccc cgcttctgcc tgcacccctg cagtttgaga caggagacct |
| 1021 | ggcactggat gcagaaacag ttcaccttga agaacctctc acttcaccct ggagcccatc |
| 1081 | cagtctccca acttgtatta aagacagagg cagaagtttg gtggtggtgg tgttggggta |
| 1141 | tggtttagta atatccacca gaccttccga tccagcagtt tggtgcccag agaggcatca |
| 1201 | tggtggcttc cctgcgccca ggaagccata tacacagatg cccattgcag cattgtttgt |
| 1261 | gatagtgaac aactggaagc tgcttaactg tccatcagca ggagactggc taaataaaat |
| 1321 | tagaatatat ttatacaaca gaatctcaaa aacactgttg agtaaggaaa aaaaggcatg |
| 1381 | ctgctgaatg atgggtatgg aactttttaa aaaagtacat gcttttatgt atgtatattg |
| 1441 | cctatggata tatgtataaa tacaatatgc atcatatatt gatataacaa gggttctgga |
| 1501 | agggtacaca gaaaacccac agctcgaaga gtggtgacgt ctggggtggg gaagaagggt |
| 1561 | ctggggg |
| Human CD40 mRNA (Variant 3) NM_001302753.1 | |
| (SEQ ID NO: 58) | |
| 1 | tttcctgggc ggggccaagg ctggggcagg ggagtcagca gaggcctcgc tcgggcgccc |
| 61 | agtggtcctg ccgcctggtc tcacctcgct atggttcgtc tgcctctgca gtgcgtcctc |
| 121 | tggggctgct tgctgaccgc tgtccatcca gaaccaccca ctgcatgcag agaaaaacag |
| 181 | tacctaataa acagtcagtg ctgttctttg tgccagccag gacagaaact ggtgagtgac |
| 241 | tgcacagagt tcactgaaac ggaatgcctt ccttgcggtg aaagcgaatt cctagacacc |
| 301 | tggaacagag agacacactg ccaccagcac aaatactgcg accccaacct agggcttcgg |
| 361 | gtccagcaga agggcacctc agaaacagac accatctgca cctgtgaaga aggctggcac |
| 421 | tgtacgagtg aggcctgtga gagctgtgtc ctgcaccgct catgctcgcc cggctttggg |
| 481 | gtcaagcaga ttgctacagg ggtttctgat accatctgcg agccctgccc agtcggcttc |
| 541 | ttctccaatg tgtcatctgc tttcgaaaaa tgtcaccctt ggacaagctg tgagaccaaa |
| 601 | gacctggttg tgcaacaggc aggcacaaac aagactgatg ttgtctgtgg tgagtcctgg |
| 661 | acaatgggcc ctggagaaag cctaggaagg tccccaggat cggctgagag ccctggtggt |
| 721 | gatccccatc atcttcggga tcctgtttgc catcctcttg gtgctggtct ttatcaaaaa |
| 781 | ggtggccaag aagccaacca ataaggcccc ccaccccaag caggaacccc aggagatcaa |
| 841 | ttttcccgac gatcttcctg gctccaacac tgctgctcca gtgcaggaga ctttacatgg |
| 901 | atgccaaccg gtcacccagg aggatggcaa agagagtcgc atctcagtgc aggagagaca |
| 961 | gtgaggctgc acccacccag gagtgtggcc acgtgggcaa acaggcagtt ggccagagag |
| 1021 | cctggtgctg ctgctgctgt ggcgtgaggg tgaggggctg gcactgactg ggcatagctc |
| 1081 | cccgcttctg cctgcacccc tgcagtttga gacaggagac ctggcactgg atgcagaaac |
| 1141 | agttcacctt gaagaacctc tcacttcacc ctggagccca tccagtctcc caacttgtat |
| 1201 | taaagacaga ggcagaagtt tggtggtggt ggtgttgggg tatggtttag taatatccac |
| 1261 | cagaccttcc gatccagcag tttggtgccc agagaggcat catggtggct tccctgcgcc |
| 1321 | caggaagcca tatacacaga tgcccattgc agcattgttt gtgatagtga acaactggaa |
| 1381 | gctgcttaac tgtccatcag caggagactg gctaaataaa attagaatat atttatacaa |
| 1441 | cagaatctca aaaacactgt tgagtaagga aaaaaaggca tgctgctgaa tgatgggtat |
| 1501 | ggaacttttt aaaaaagtac atgcttttat gtatgtatat tgcctatgga tatatgtata |
| 1561 | aatacaatat gcatcatata ttgatataac aagggttctg gaagggtaca cagaaaaccc |
| 1621 | acagctcgaa gagtggtgac gtctggggtg gggaagaagg gtctggggg |
| Human CD40 mRNA (Variant 5) NM_001322421.1 | |
| (SEQ ID NO: 59) | |
| 1 | tttcctgggc ggggccaagg ctggggcagg ggagtcagca gaggcctcgc tcgggcgccc |
| 61 | agtggtcctg ccgcctggtc tcacctcgct atggttcgtc tgcctctgca gtgcgtcctc |
| 121 | tggggctgct tgctgaccgc tgtccatcca gaaccaccca ctgcatgcag agaaaaacag |
| 181 | tacctaataa acagtcagtg ctgttctttg tgccagccag gacagaaact ggtgagtgac |
| 241 | tgcacagagt tcactgaaac ggaatgcctt ccttgcggtg aaagcgaatt cctagacacc |
| 301 | tggaacagag agacacactg ccaccagcac aaatactgcg accccaacct agggcttcgg |
| 361 | gtccagcaga agggcacctc agaaacagac accatctgca cctgtgaaga aggctggcac |
| 421 | tgtacgagtg aggcctgtga gagctgtgtc ctgcaccgct catgctcgcc cggctttggg |
| 481 | gtcaagcaga ttgctacagg ggtttctgat accatctgcg agccctgccc agtcggcttc |
| 541 | ttctccaatg tgtcatctgc tttcgaaaaa tgtcaccctt ggacaagctg tgagaccaaa |
| 601 | gacctggttg tgcaacaggc aggcacaaac aagactgatg ttgtctgtgg tccccaggat |
| 661 | cggctgagag ccctggtggt gatccccatc atcttcggga tcctgtttgc catcctcttg |
| 721 | gtgctggtct ttatcagtga gtcctcagaa aaggtggcca agaagccaac caataaggcc |
| 781 | ccccacccca agcaggaacc ccaggagatc aattttcccg acgatcttcc tggctccaac |
| 841 | actgctgctc cagtgcagga gactttacat ggatgccaac cggtcaccca ggaggatggc |
| 901 | aaagagagtc gcatctcagt gcaggagaga cagtgaggct gcacccaccc aggagtgtgg |
| 961 | ccacgtgggc aaacaggcag ttggccagag agcctggtgc tgctgctgct gtggcgtgag |
| 1021 | ggtgaggggc tggcactgac tgggcatagc tccccgcttc tgcctgcacc cctgcagttt |
| 1081 | gagacaggag acctggcact ggatgcagaa acagttcacc ttgaagaacc tctcacttca |
| 1141 | ccctggagcc catccagtct cccaacttgt attaaagaca gaggcagaag tttggtggtg |
| 1201 | gtggtgttgg ggtatggttt agtaatatcc accagacctt ccgatccagc agtttggtgc |
| 1261 | ccagagaggc atcatggtgg cttccctgcg cccaggaagc catatacaca gatgcccatt |
| 1321 | gcagcattgt ttgtgatagt gaacaactgg aagctgctta actgtccatc agcaggagac |
| 1381 | tggctaaata aaattagaat atatttatac aacagaatct caaaaacact gttgagtaag |
| 1441 | gaaaaaaagg catgctgctg aatgatgggt atggaacttt ttaaaaaagt acatgctttt |
| 1501 | atgtatgtat attgcctatg gatatatgta taaatacaat atgcatcata tattgatata |
| 1561 | acaagggttc tggaagggta cacagaaaac ccacagctcg aagagtggtg acgtctgggg |
| 1621 | tggggaagaa gggtctgggg g |
| Human CD40 mRNA (Variant 6) NM_001322422.1 | |
| (SEQ ID NO: 60) | |
| 1 | tttcctgggc ggggccaagg ctggggcagg ggagtcagca gaggcctcgc tcgggcgccc |
| 61 | agtggtcctg ccgcctggtc tcacctcgct atggttcgtc tgcctctgca gtgcgtcctc |
| 121 | tggggctgct tgctgaccgc tgtccatcca gaaccaccca ctgcatgcag agaaaaacag |
| 181 | tacctaataa acagtcagtg ctgttctttg tgccagccag gacagaaact ggtgagtgac |
| 241 | tgcacagagt tcactgaaac ggaatgcctt ccttgcggtg aaagcgaatt cctagacacc |
| 301 | tggaacagag agacacactg ccaccagcac aaatactgcg accccaacct agggcttcgg |
| 361 | gtccagcaga agggcacctc agaaacagac accatctgca cctgtgaaga aggctggcac |
| 421 | tgtacgagtg aggcctgtga gagctgtgtc ctgcaccgct catgctcgcc cggctttggg |
| 481 | gtcaagcaga ttggtcccca ggatcggctg agagccctgg tggtgatccc catcatcttc |
| 541 | gggatcctgt ttgccatcct cttggtgctg gtctttatca aaaaggtggc caagaagcca |
| 601 | accaataagg ccccccaccc caagcaggaa ccccaggaga tcaattttcc cgacgatctt |
| 661 | cctggctcca acactgctgc tccagtgcag gagactttac atggatgcca accggtcacc |
| 721 | caggaggatg gcaaagagag tcgcatctca gtgcaggaga gacagtgagg ctgcacccac |
| 781 | ccaggagtgt ggccacgtgg gcaaacaggc agttggccag agagcctggt gctgctgctg |
| 841 | ctgtggcgtg agggtgaggg gctggcactg actgggcata gctccccgct tctgcctgca |
| 901 | cccctgcagt ttgagacagg agacctggca ctggatgcag aaacagttca ccttgaagaa |
| 961 | cctctcactt caccctggag cccatccagt ctcccaactt gtattaaaga cagaggcaga |
| 1021 | agtttggtgg tggtggtgtt ggggtatggt ttagtaatat ccaccagacc ttccgatcca |
| 1081 | gcagtttggt gcccagagag gcatcatggt ggcttccctg cgcccaggaa gccatataca |
| 1141 | cagatgccca ttgcagcatt gtttgtgata gtgaacaact ggaagctgct taactgtcca |
| 1201 | tcagcaggag actggctaaa taaaattaga atatatttat acaacagaat ctcaaaaaca |
| 1261 | ctgttgagta aggaaaaaaa ggcatgctgc tgaatgatgg gtatggaact ttttaaaaaa |
| 1321 | gtacatgctt ttatgtatgt atattgccta tggatatatg tataaataca atatgcatca |
| 1381 | tatattgata taacaagggt tctggaaggg tacacagaaa acccacagct cgaagagtgg |
| 1441 | tgacgtctgg ggtggggaag aagggtctgg ggg |
| Human CD154 (CD40L) mRNA NM_000074.2 | |
| (SEQ ID NO: 61) | |
| 1 | actttgacag tcttctcatg ctgcctctgc caccttctct gccagaagat accatttcaa |
| 61 | ctttaacaca gcatgatcga aacatacaac caaacttctc cccgatctgc ggccactgga |
| 121 | ctgcccatca gcatgaaaat ttttatgtat ttacttactg tttttcttat cacccagatg |
| 181 | attgggtcag cactttttgc tgtgtatctt catagaaggt tggacaagat agaagatgaa |
| 241 | aggaatcttc atgaagattt tgtattcatg aaaacgatac agagatgcaa cacaggagaa |
| 301 | agatccttat ccttactgaa ctgtgaggag attaaaagcc agtttgaagg ctttgtgaag |
| 361 | gatataatgt taaacaaaga ggagacgaag aaagaaaaca gctttgaaat gcaaaaaggt |
| 421 | gatcagaatc ctcaaattgc ggcacatgtc ataagtgagg ccagcagtaa aacaacatct |
| 481 | gtgttacagt gggctgaaaa aggatactac accatgagca acaacttggt aaccctggaa |
| 541 | aatgggaaac agctgaccgt taaaagacaa ggactctatt atatctatgc ccaagtcacc |
| 601 | ttctgttcca atcgggaagc ttcgagtcaa gctccattta tagccagcct ctgcctaaag |
| 661 | tcccccggta gattcgagag aatcttactc agagctgcaa atacccacag ttccgccaaa |
| 721 | ccttgcgggc aacaatccat tcacttggga ggagtatttg aattgcaacc aggtgcttcg |
| 781 | gtgtttgtca atgtgactga tccaagccaa gtgagccatg gcactggctt cacgtccttt |
| 841 | ggcttactca aactctgaac agtgtcacct tgcaggctgt ggtggagctg acgctgggag |
| 901 | tcttcataat acagcacagc ggttaagccc accccctgtt aactgcctat ttataaccct |
| 961 | aggatcctcc ttatggagaa ctatttatta tacactccaa ggcatgtaga actgtaataa |
| 1021 | gtgaattaca ggtcacatga aaccaaaacg ggccctgctc cataagagct tatatatctg |
| 1081 | aagcagcaac cccactgatg cagacatcca gagagtccta tgaaaagaca aggccattat |
| 1141 | gcacaggttg aattctgagt aaacagcaga taacttgcca agttcagttt tgtttctttg |
| 1201 | cgtgcagtgt ctttccatgg ataatgcatt tgatttatca gtgaagatgc agaagggaaa |
| 1261 | tggggagcct cagctcacat tcagttatgg ttgactctgg gttcctatgg ccttgttgga |
| 1321 | gggggccagg ctctagaacg tctaacacag tggagaaccg aaaccccccc cccccccccg |
| 1381 | ccaccctctc ggacagttat tcattctctt tcaatctctc tctctccatc tctctctttc |
| 1441 | agtctctctc tctcaacctc tttcttccaa tctctctttc tcaatctctc tgtttccctt |
| 1501 | tgtcagtctc ttccctcccc cagtctctct tctcaatccc cctttctaac acacacacac |
| 1561 | acacacacac acacacacac acacacacac acacacacac agagtcaggc cgttgctagt |
| 1621 | cagttctctt ctttccaccc tgtccctatc tctaccacta tagatgaggg tgaggagtag |
| 1681 | ggagtgcagc cctgagcctg cccactcctc attacgaaat gactgtattt aaaggaaatc |
| 1741 | tattgtatct acctgcagtc tccattgttt ccagagtgaa cttgtaatta tcttgttatt |
| 1801 | tattttttga ataataaaga cctcttaaca ttaa |

### Inhibitory Nucleic Acids

[0451] An antisense nucleic acid molecule can be complementary to all or part of a non-coding region of the coding strand of a nucleotide sequence encoding a CD40 or CD40L protein. Non-coding regions (5′ and 3′ untranslated regions) are the 5′ and 3′ sequences that flank the coding region in a gene and are not translated into amino acids.

[0452] Based upon the sequences disclosed herein, one of skill in the art can easily choose and synthesize any of a number of appropriate antisense nucleic acids to target a nucleic acid encoding a CD40 or CD40L protein described herein. Antisense nucleic acids targeting a nucleic acid encoding a CD40 or CD40L protein can be designed using the software available at the Integrated DNA Technologies website.

[0453] An antisense nucleic acid can be, for example, about 5, 10, 15, 20, 25, 30, 35, 40, 45, or 50 nucleotides or more in length. An antisense oligonucleotide can be constructed using chemical synthesis and enzymatic ligation reactions using procedures known in the art. For example, an antisense nucleic acid can be chemically synthesized using naturally-occurring nucleotides or variously modified nucleotides designed to increase the biological stability of the molecules or to increase the physical stability of the duplex formed between the antisense and sense nucleic acids, e.g., phosphorothioate derivatives and acridine-substituted nucleotides can be used.

[0454] Examples of modified nucleotides which can be used to generate an antisense nucleic acid include 5-fluorouracil, 5-bromouracil, 5-chlorouracil, 5-iodouracil, hypoxanthine, xanthine, 4-acetylcytosine, 5-(carboxyhydroxylmethyl) uracil, 5-carboxymethylaminomethyl-2-thiouridine, 5-carboxymethylaminomethyluracil, dihydrouracil, beta-D-galactosylqueosine, inosine, N6-isopentenyladenine, 1-methylguanine, 1-methylinosine, 2,2-dimethylguanine, 2-methyladenine, 2-methylguanine, 3-methylcytosine, 5-methylcytosine, N6-adenine, 7-methylguanine, 5-methylaminomethyluracil, 5-methoxyaminomethyl-2-thiouracil, beta-D-mannosylqueosine, 5′-methoxycarboxymethyluracil, 5-methoxyuracil, 2-methylthio-N6-isopentenyladenine, uracil-5-oxyacetic acid (v), wybutoxosine, pseudouracil, queosine, 2-thiocytosine, 5-methyl-2-thiouracil, 2-thiouracil, 4-thiouracil, 5-methyluracil, uracil-5-oxyacetic acid methylester, uracil-5-oxyacetic acid (v), 5-methyl-2-thiouracil, 3-(3-amino-3-N-2-carboxypropyl) uracil, (acp3)w, and 2,6-diaminopurine. Alternatively, the antisense nucleic acid can be produced biologically using an expression vector into which a nucleic acid has been subcloned in an antisense orientation (i.e., RNA transcribed from the inserted nucleic acid will be of an antisense orientation to a target nucleic acid of interest).

[0455] The antisense nucleic acid molecules described herein can be prepared in vitro and administered to a mammal, e.g., a human, using any of the devices described herein. Alternatively, they can be generated in situ such that they hybridize with or bind to cellular mRNA and/or genomic DNA encoding a CD40 or CD40L protein to thereby inhibit expression, e.g., by inhibiting transcription and/or translation. The hybridization can be by conventional nucleotide complementarities to form a stable duplex, or, for example, in the case of an antisense nucleic acid molecule that binds to DNA duplexes, through specific interactions in the major groove of the double helix. The antisense nucleic acid molecules can be delivered to a mammalian cell using a vector (e.g., a lentivirus, a retrovirus, or an adenovirus vector).

[0456] An antisense nucleic acid can be an α-anomeric nucleic acid molecule. An α-anomeric nucleic acid molecule forms specific double-stranded hybrids with complementary RNA in which, contrary to the usual, 0-units, the strands run parallel to each other (Gaultier et al., Nucleic Acids Res. 15:6625-6641, 1987). The antisense nucleic acid can also comprise a 2′-O-methylribonucleotide (Inoue et al., Nucleic Acids Res. 15:6131-6148, 1987) or a chimeric RNA-DNA analog (Inoue et al., FEBS Lett. 215:327-330, 1987).

[0457] Some exemplary antisense nucleic acids that are CD40 or CD40L inhibitors are described, e.g., in U.S. Pat. Nos. 6,197,584 and 7,745,609; Gao et al., Gut 54(1):70-77, 2005; Arranz et al., J Control Release 165(3):163-172, 2012; Donner et al., Mol. Ther. Nucleic Acids 4:e265, 2015.

[0458] Another example of an inhibitory nucleic acid is a ribozyme that has specificity for a nucleic acid encoding a CD40 or CD40L protein (e.g., specificity for a CD40 or CD40L mRNA, e.g., specificity for any one of SEQ ID NOs: 56-61). Ribozymes are catalytic RNA molecules with ribonuclease activity that are capable of cleaving a single-stranded nucleic acid, such as an mRNA, to which they have a complementary region. Thus, ribozymes (e.g., hammerhead ribozymes (described in Haselhoff and Gerlach, Nature 334:585-591, 1988)) can be used to catalytically cleave mRNA transcripts to thereby inhibit translation of the protein encoded by the mRNA. A ribozyme having specificity for a CD40 or CD40L mRNA can be designed based upon the nucleotide sequence of any of the CD40 or CD40L mRNA sequences disclosed herein. For example, a derivative of a Tetrahymena L-19 IVS RNA can be constructed in which the nucleotide sequence of the active site is complementary to the nucleotide sequence to be cleaved in a CD40 or CD40L mRNA (see, e.g., U.S. Pat. Nos. 4,987,071 and 5,116,742). Alternatively, a CD40 or CD40L mRNA can be used to select a catalytic RNA having a specific ribonuclease activity from a pool of RNA molecules. See, e.g., Bartel et al., Science 261:1411-1418, 1993.

[0459] An inhibitory nucleic acid can also be a nucleic acid molecule that forms triple helical structures. For example, expression of a CD40 or CD40L polypeptide can be inhibited by targeting nucleotide sequences complementary to the regulatory region of the gene encoding the CD40 or CD40L polypeptide (e.g., the promoter and/or enhancer, e.g., a sequence that is at least 1 kb, 2 kb, 3 kb, 4 kb, or 5 kb upstream of the transcription initiation start state) to form triple helical structures that prevent transcription of the gene in target cells. See generally Helene, Anticancer Drug Des. 6(6):569-84, 1991; Helene, Ann. N.Y. Acad. Sci. 660:27-36, 1992; and Maher, Bioassays 14(12):807-15, 1992.

[0460] In various embodiments, inhibitory nucleic acids can be modified at the base moiety, sugar moiety, or phosphate backbone to improve, e.g., the stability, hybridization, or solubility of the molecule. For example, the deoxyribose phosphate backbone of the nucleic acids can be modified to generate peptide nucleic acids (see, e.g., Hyrup et al., Bioorg. Med. Chem. 4(1):5-23, 1996). Peptide nucleic acids (PNAs) are nucleic acid mimics, e.g., DNA mimics, in which the deoxyribose phosphate backbone is replaced by a pseudopeptide backbone and only the four natural nucleobases are retained. The neutral backbone of PNAs allows for specific hybridization to DNA and RNA under conditions of low ionic strength. The synthesis of PNA oligomers can be performed using standard solid phase peptide synthesis protocols (see, e.g., Perry-O'Keefe et al., Proc. Nat. Acad. Sci. U.S.A. 93:14670-675, 1996). PNAs can be used as antisense or antigene agents for sequence-specific modulation of gene expression by, e.g., inducing transcription or translation arrest or inhibiting replication.

[0461] PNAs can be modified, e.g., to enhance their stability or cellular uptake, by attaching lipophilic or other helper groups to PNA, by the formation of PNA-DNA chimeras, or by the use of liposomes or other techniques of drug delivery known in the art. For example, PNA-DNA chimeras can be generated which may combine the advantageous properties of PNA and DNA. Such chimeras allow DNA recognition enzymes, e.g., RNAse H and DNA polymerases, to interact with the DNA portion while the PNA portion would provide high binding affinity and specificity. PNA-DNA chimeras can be linked using linkers of appropriate lengths selected in terms of base stacking, number of bonds between the nucleobases, and orientation.

[0462] The synthesis of PNA-DNA chimeras can be performed as described in Finn et al., Nucleic Acids Res. 24:3357-63, 1996. For example, a DNA chain can be synthesized on a solid support using standard phosphoramidite coupling chemistry and modified nucleoside analogs. Compounds such as 5′-(4-methoxytrityl)amino-5′-deoxy-thymidine phosphoramidite can be used as a link between the PNA and the 5′ end of DNA (Mag et al., Nucleic Acids Res. 17:5973-88, 1989). PNA monomers are then coupled in a stepwise manner to produce a chimeric molecule with a 5′ PNA segment and a 3′ DNA segment (Finn et al., Nucleic Acids Res. 24:3357-63, 1996). Alternatively, chimeric molecules can be synthesized with a 5′ DNA segment and a 3′ PNA segment (Peterser et al., Bioorg. Med. Chem. Lett. 5:1119-11124, 1975).

[0463] In some embodiments, the inhibitory nucleic acids can include other appended groups such as peptides, or agents facilitating transport across the cell membrane (see, Letsinger et al., Proc. Nat. Acad. Sci. U.S.A. 86:6553-6556, 1989; Lemaitre et al., Proc. Nat. Acad. Sci. U.S.A. 84:648-652, 1989; and WO 88/09810). In addition, the inhibitory nucleic acids can be modified with hybridization-triggered cleavage agents (see, e.g., Krol et al., Bio/Techniques 6:958-976, 1988) or intercalating agents (see, e.g., Zon, Pharm. Res. 5:539-549, 1988). To this end, the oligonucleotide may be conjugated to another molecule, e.g., a peptide, hybridization triggered cross-linking agent, transport agent, hybridization-triggered cleavage agent, etc.

[0464] Another means by which expression of a CD40 or CD40L mRNA can be decreased in a mammalian cell is by RNA interference (RNAi). RNAi is a process in which mRNA is degraded in host cells. To inhibit an mRNA, double-stranded RNA (dsRNA) corresponding to a portion of the gene to be silenced (e.g., a gene encoding a CD40 or CD40L polypeptide) is introduced into a mammalian cell. The dsRNA is digested into 21-23 nucleotide-long duplexes called short interfering RNAs (or siRNAs), which bind to a nuclease complex to form what is known as the RNA-induced silencing complex (or RISC). The RISC targets the homologous transcript by base pairing interactions between one of the siRNA strands and the endogenous mRNA. It then cleaves the mRNA about 12 nucleotides from the 3′ terminus of the siRNA (see Sharp et al., Genes Dev. 15:485-490, 2001, and Hammond et al., Nature Rev. Gen. 2:110-119, 2001).

[0465] RNA-mediated gene silencing can be induced in a mammalian cell in many ways, e.g., by enforcing endogenous expression of RNA hairpins (see, Paddison et al., Proc. Nat. Acad. Sci. U.S.A. 99:1443-1448, 2002) or, as noted above, by transfection of small (21-23 nt) dsRNA (reviewed in Caplen, Trends Biotech. 20:49-51, 2002). Methods for modulating gene expression with RNAi are described, e.g., in U.S. Pat. No. 6,506,559 and US 2003/0056235, which are hereby incorporated by reference.

[0466] Standard molecular biology techniques can be used to generate siRNAs. Short interfering RNAs can be chemically synthesized, recombinantly produced, e.g., by expressing RNA from a template DNA, such as a plasmid, or obtained from commercial vendors, such as Dharmacon. The RNA used to mediate RNAi can include synthetic or modified nucleotides, such as phosphorothioate nucleotides. Methods of transfecting cells with siRNA or with plasmids engineered to make siRNA are routine in the art.

[0467] The siRNA molecules used to decrease expression of a CD40 or CD40L mRNA can vary in a number of ways. For example, they can include a 3′ hydroxyl group and strands of 21, 22, or 23 consecutive nucleotides. They can be blunt ended or include an overhanging end at either the 3′ end, the 5′ end, or both ends. For example, at least one strand of the RNA molecule can have a 3′ overhang from about 1 to about 6 nucleotides (e.g., 1-5, 1-3, 2-4, or 3-5 nucleotides (whether pyrimidine or purine nucleotides) in length. Where both strands include an overhang, the length of the overhangs may be the same or different for each strand.

[0468] To further enhance the stability of the RNA duplexes, the 3′ overhangs can be stabilized against degradation (by, e.g., including purine nucleotides, such as adenosine or guanosine nucleotides or replacing pyrimidine nucleotides by modified analogues (e.g., substitution of uridine 2-nucleotide 3′ overhangs by 2′-deoxythymidine is tolerated and does not affect the efficiency of RNAi). Any siRNA can be used in the methods of decreasing a CD40 or CD40L mRNA, provided it has sufficient homology to the target of interest (e.g., a sequence present in any one of SEQ ID NOs: 56-61, e.g., a target sequence encompassing the translation start site or the first exon of the mRNA). There is no upper limit on the length of the siRNA that can be used (e.g., the siRNA can range from about 21 base pairs of the gene to the full length of the gene or more (e.g., about 20 to about 30 base pairs, about 50 to about 60 base pairs, about 60 to about 70 base pairs, about 70 to about 80 base pairs, about 80 to about 90 base pairs, or about 90 to about 100 base pairs).

[0469] Non-limiting examples of short interfering RNA (siRNA) that are CD40/CD40L inhibitors are described in, e.g., Pluvinet et al., Blood 104:3642-3646, 2004; Karimi et al., Cell Immunol. 259(1):74-81, 2009; and Zheng et al., Arthritis Res. Ther. 12(1):R13, 2010. Non-limiting examples of short hairpin RNA (shRNA) targeting CD40/CD40L are described in Zhang et al., Gene Therapy 21:709-714, 2014. Non-limiting examples of microRNAs that are CD40/CD40L inhibitors include, for example, miR146a (Chen et al., FEBS Letters 585(3):567-573, 2011), miR-424, and miR-503 (Lee et al., Sci. Rep. 7:2528, 2017).

[0470] Non-limiting examples of aptamers that are CD40/CD40L inhibitors are described in Soldevilla et al., Biomaterials 67:274-285, 2015.

[0471] In certain embodiments, a therapeutically effective amount of an inhibitory nucleic acid targeting a nucleic acid encoding a CD40 or CD40L protein can be delivered locally to a subject (e.g., a human subject) in need thereof using any of the devices described herein.

[0472] In some embodiments, the inhibitory nucleic acid can be about 10 nucleotides to about 40 nucleotides (e.g., about 10 to about 30 nucleotides, about 10 to about 25 nucleotides, about 10 to about 20 nucleotides, about 10 to about 15 nucleotides, 10 nucleotides, 11 nucleotides, 12 nucleotides, 13 nucleotides, 14 nucleotides, 15 nucleotides, 16 nucleotides, 17 nucleotides, 18 nucleotides, 19 nucleotides, 20 nucleotides, 21 nucleotides, 22 nucleotides, 23 nucleotides, 24 nucleotides, 25 nucleotides, 26 nucleotides, 27 nucleotides, 28 nucleotides, 29 nucleotides, 30 nucleotides, 31 nucleotides, 32 nucleotides, 33 nucleotides, 34 nucleotides, 35 nucleotides, 36 nucleotides, 37 nucleotides, 38 nucleotides, 39 nucleotides, or 40 nucleotides) in length. One skilled in the art will appreciate that inhibitory nucleic acids may comprise at least one modified nucleic acid at either the 5′ or 3′end of DNA or RNA.

[0473] Any of the inhibitor nucleic acids described herein can be formulated for administration to the gastrointestinal tract. See, e.g., the formulation methods described in US 2016/0090598 and Schoellhammer et al., Gastroenterology, doi: 10.1053/j.gastro.2017.01.002, 2017.

[0474] As is known in the art, the term “thermal melting point (Tm)” refers to the temperature, under defined ionic strength, pH, and inhibitory nucleic acid concentration, at which 50% of the inhibitory nucleic acids complementary to the target sequence hybridize to the target sequence at equilibrium. In some embodiments, an inhibitory nucleic acid can bind specifically to a target nucleic acid under stringent conditions, e.g., those in which the salt concentration is at least about 0.01 to 1.0 M Na ion concentration (or other salts) at pH 7.0 to 8.3 and the temperature is at least about 30° C. for short oligonucleotides (e.g., 10 to 50 nucleotide). Stringent conditions can also be achieved with the addition of destabilizing agents such as formamide.

[0475] In some embodiments of any of the inhibitory nucleic acids described herein, the inhibitory nucleic acid binds to a target nucleic acid (e.g., a nucleic acid encoding CD40 or CD40L) with a Tm of greater than 20° C., greater than 22° C., greater than 24° C., greater than 26° C., greater than 28° C., greater than 30° C., greater than 32° C., greater than 34° C., greater than 36° C., greater than 38° C., greater than 40° C., greater than 42° C., greater than 44° C., greater than 46° C., greater than 48° C., greater than 50° C., greater than 52° C., greater than 54° C., greater than 56° C., greater than 58° C., greater than 60° C., greater than 62° C., greater than 64° C., greater than 66° C., greater than 68° C., greater than 70° C., greater than 72° C., greater than 74° C., greater than 76° C., greater than 78° C., or greater than 80° C., e.g., as measured in phosphate buffered saline using a UV spectrophotometer.

[0476] In some embodiments of any of the inhibitor nucleic acids described herein, the inhibitory nucleic acid binds to a target nucleic acid (e.g., a nucleic acid encoding CD40 or CD40L) with a Tm of about 20° C. to about 80° C., about 78° C., about 76° C., about 74° C., about 72° C., about 70° C., about 68° C., about 66° C., about 64° C., about 62° C., about 60° C., about 58° C., about 56° C., about 54° C., about 52° C., about 50° C., about 48° C., about 46° C., about 44° C., about 42° C., about 40° C., about 38° C., about 36° C., about 34° C., about 32° C., about 30° C., about 28° C., about 26° C., about 24° C., or about 22° C. (inclusive); about 22° C. to about 80° C., about 78° C., about 76° C., about 74° C., about 72° C., about 70° C., about 68° C., about 66° C., about 64° C., about 62° C., about 60° C., about 58° C., about 56° C., about 54° C., about 52° C., about 50° C., about 48° C., about 46° C., about 44° C., about 42° C., about 40° C., about 38° C., about 36° C., about 34° C., about 32° C., about 30° C., about 28° C., about 26° C., or about 24° C. (inclusive); about 24° C. to about 80° C., about 78° C., about 76° C., about 74° C., about 72° C., about 70° C., about 68° C., about 66° C., about 64° C., about 62° C., about 60° C., about 58° C., about 56° C., about 54° C., about 52° C., about 50° C., about 48° C., about 46° C., about 44° C., about 42° C., about 40° C., about 38° C., about 36° C., about 34° C., about 32° C., about 30° C., about 28° C., or about 26° C. (inclusive); about 26° C. to about 80° C., about 78° C., about 76° C., about 74° C., about 72° C., about 70° C., about 68° C., about 66° C., about 64° C., about 62° C., about 60° C., about 58° C., about 56° C., about 54° C., about 52° C., about 50° C., about 48° C., about 46° C., about 44° C., about 42° C., about 40° C., about 38° C., about 36° C., about 34° C., about 32° C., about 30° C., or about 28° C. (inclusive); about 28° C. to about 80° C., about 78° C., about 76° C., about 74° C., about 72° C., about 70° C., about 68° C., about 66° C., about 64° C., about 62° C., about 60° C., about 58° C., about 56° C., about 54° C., about 52° C., about 50° C., about 48° C., about 46° C., about 44° C., about 42° C., about 40° C., about 38° C., about 36° C., about 34° C., about 32° C., or about 30° C. (inclusive); about 30° C. to about 80° C., about 78° C., about 76° C., about 74° C., about 72° C., about 70° C., about 68° C., about 66° C., about 64° C., about 62° C., about 60° C., about 58° C., about 56° C., about 54° C., about 52° C., about 50° C., about 48° C., about 46° C., about 44° C., about 42° C., about 40° C., about 38° C., about 36° C., about 34° C., or about 32° C. (inclusive); about 32° C. to about 80° C., about 78° C., about 76° C., about 74° C., about 72° C., about 70° C., about 68° C., about 66° C., about 64° C., about 62° C., about 60° C., about 58° C., about 56° C., about 54° C., about 52° C., about 50° C., about 48° C., about 46° C., about 44° C., about 42° C., about 40° C., about 38° C., about 36° C., or about 34° C. (inclusive); about 34° C. to about 80° C., about 78° C., about 76° C., about 74° C., about 72° C., about 70° C., about 68° C., about 66° C., about 64° C., about 62° C., about 60° C., about 58° C., about 56° C., about 54° C., about 52° C., about 50° C., about 48° C., about 46° C., about 44° C., about 42° C., about 40° C., about 38° C., or about 36° C. (inclusive); about 36° C. to about 80° C., about 78° C., about 76° C., about 74° C., about 72° C., about 70° C., about 68° C., about 66° C., about 64° C., about 62° C., about 60° C., about 58° C., about 56° C., about 54° C., about 52° C., about 50° C., about 48° C., about 46° C., about 44° C., about 42° C., about 40° C., or about 38° C. (inclusive); about 38° C. to about 80° C., about 78° C., about 76° C., about 74° C., about 72° C., about 70° C., about 68° C., about 66° C., about 64° C., about 62° C., about 60° C., about 58° C., about 56° C., about 54° C., about 52° C., about 50° C., about 48° C., about 46° C., about 44° C., about 42° C., or about 40° C. (inclusive); about 40° C. to about 80° C., about 78° C., about 76° C., about 74° C., about 72° C., about 70° C., about 68° C., about 66° C., about 64° C., about 62° C., about 60° C., about 58° C., about 56° C., about 54° C., about 52° C., about 50° C., about 48° C., about 46° C., about 44° C., or about 42° C. (inclusive); about 42° C. to about 80° C., about 78° C., about 76° C., about 74° C., about 72° C., about 70° C., about 68° C., about 66° C., about 64° C., about 62° C., about 60° C., about 58° C., about 56° C., about 54° C., about 52° C., about 50° C., about 48° C., about 46° C., or about 44° C. (inclusive); about 44° C. to about 80° C., about 78° C., about 76° C., about 74° C., about 72° C., about 70° C., about 68° C., about 66° C., about 64° C., about 62° C., about 60° C., about 58° C., about 56° C., about 54° C., about 52° C., about 50° C., about 48° C., or about 46° C. (inclusive); about 46° C. to about 80° C., about 78° C., about 76° C., about 74° C., about 72° C., about 70° C., about 68° C., about 66° C., about 64° C., about 62° C., about 60° C., about 58° C., about 56° C., about 54° C., about 52° C., about 50° C., or about 48° C. (inclusive); about 48° C. to about 80° C., about 78° C., about 76° C., about 74° C., about 72° C., about 70° C., about 68° C., about 66° C., about 64° C., about 62° C., about 60° C., about 58° C., about 56° C., about 54° C., about 52° C., or about 50° C. (inclusive); about 50° C. to about 80° C., about 78° C., about 76° C., about 74° C., about 72° C., about 70° C., about 68° C., about 66° C., about 64° C., about 62° C., about 60° C., about 58° C., about 56° C., about 54° C., or about 52° C. (inclusive); about 52° C. to about 80° C., about 78° C., about 76° C., about 74° C., about 72° C., about 70° C., about 68° C., about 66° C., about 64° C., about 62° C., about 60° C., about 58° C., about 56° C., or about 54° C. (inclusive); about 54° C. to about 80° C., about 78° C., about 76° C., about 74° C., about 72° C., about 70° C., about 68° C., about 66° C., about 64° C., about 62° C., about 60° C., about 58° C., or about 56° C. (inclusive); about 56° C. to about 80° C., about 78° C., about 76° C., about 74° C., about 72° C., about 70° C., about 68° C., about 66° C., about 64° C., about 62° C., about 60° C., or about 58° C. (inclusive); about 58° C. to about 80° C., about 78° C., about 76° C., about 74° C., about 72° C., about 70° C., about 68° C., about 66° C., about 64° C., about 62° C., or about 60° C. (inclusive); about 60° C. to about 80° C., about 78° C., about 76° C., about 74° C., about 72° C., about 70° C., about 68° C., about 66° C., about 64° C., or about 62° C. (inclusive); about 62° C. to about 80° C., about 78° C., about 76° C., about 74° C., about 72° C., about 70° C., about 68° C., about 66° C., or about 64° C. (inclusive); about 64° C. to about 80° C., about 78° C., about 76° C., about 74° C., about 72° C., about 70° C., about 68° C., or about 66° C. (inclusive); about 66° C. to about 80° C., about 78° C., about 76° C., about 74° C., about 72° C., about 70° C., or about 68° C. (inclusive); about 68° C. to about 80° C., about 78° C., about 76° C., about 74° C., about 72° C., or about 70° C. (inclusive); about 70° C. to about 80° C., about 78° C., about 76° C., about 74° C., or about 72° C. (inclusive); about 72° C. to about 80° C., about 78° C., about 76° C., or about 74° C. (inclusive); about 74° C. to about 80° C., about 78° C., or about 76° C. (inclusive); about 76° C. to about 80° C. or about 78° C. (inclusive); or about 78° C. to about 80° C. (inclusive).

[0477] In some embodiments, the inhibitory nucleic acid can be formulated in a nanoparticle (e.g., a nanoparticle including one or more synthetic polymers, e.g., Patil et al., Pharmaceutical Nanotechnol. 367:195-203, 2009; Yang et al., ACS Appl. Mater. Interfaces, doi: 10.1021/acsami.6b16556, 2017; Perepelyuk et al., Mol. Ther. Nucleic Acids 6:259-268, 2017). In some embodiments, the nanoparticle can be a mucoadhesive particle (e.g., nanoparticles having a positively-charged exterior surface) (Andersen et al., Methods Mol. Biol. 555:77-86, 2009). In some embodiments, the nanoparticle can have a neutrally-charged exterior surface.

[0478] In some embodiments, the inhibitory nucleic acid can be formulated, e.g., as a liposome (Buyens et al., J. Control Release 158(3): 362-370, 2012; Scarabel et al., Expert Opin. Drug Deliv. 17:1-14, 2017), a micelle (e.g., a mixed micelle) (Tangsangasaksri et al., BioMacromolecules 17:246-255, 2016; Wu et al., Nanotechnology, doi: 10.1088/1361-6528/aa6519, 2017), a microemulsion (WO 11/004395), a nanoemulsion, or a solid lipid nanoparticle (Sahay et al., Nature Biotechnol. 31:653-658, 2013; and Lin et al., Nanomedicine 9(1):105-120, 2014). Additional exemplary structural features of inhibitory nucleic acids and formulations of inhibitory nucleic acids are described in US 2016/0090598.

[0479] In some embodiments, a pharmaceutical composition can include a sterile saline solution and one or more inhibitory nucleic acid (e.g., any of the inhibitory nucleic acids described herein). In some examples, a pharmaceutical composition consists of a sterile saline solution and one or more inhibitory nucleic acid (e.g., any of the inhibitory nucleic acids described herein). In certain embodiments, the sterile saline is a pharmaceutical grade saline. In certain embodiments, a pharmaceutical composition can include one or more inhibitory nucleic acid (e.g., any of the inhibitory nucleic acids described herein) and sterile water. In certain embodiments, a pharmaceutical composition consists of one or more inhibitory nucleic acid (e.g., any of the inhibitory nucleic acids described herein) and sterile water. In certain embodiments, a pharmaceutical composition includes one or more inhibitory nucleic acid (e.g., any of the inhibitory nucleic acids described herein) and phosphate-buffered saline (PBS). In certain embodiments, a pharmaceutical composition consists of one or more inhibitory nucleic acids (e.g., any of the inhibitory nucleic acids described herein) and sterile phosphate-buffered saline (PBS). In some examples, the sterile saline is a pharmaceutical grade PBS.

[0480] In certain embodiments, one or more inhibitory nucleic acids (e.g., any of the inhibitory nucleic acids described herein) may be admixed with pharmaceutically acceptable active and/or inert substances for the preparation of pharmaceutical compositions or formulations. Compositions and methods for the formulation of pharmaceutical compositions depend on a number of criteria, including, but not limited to, route of administration, extent of disease, or dose to be administered.

[0481] Pharmaceutical compositions including one or more inhibitory nucleic acids encompass any pharmaceutically acceptable salts, esters, or salts of such esters. Non-limiting examples of pharmaceutical compositions include pharmaceutically acceptable salts of inhibitory nucleic acids. Suitable pharmaceutically acceptable salts include, but are not limited to, sodium and potassium salts.

[0482] Also provided herein are prodrugs that can include additional nucleosides at one or both ends of an inhibitory nucleic acid which are cleaved by endogenous nucleases within the body, to form the active inhibitory nucleic acid.

[0483] Lipid moieties can be used to formulate an inhibitory nucleic acid. In certain such methods, the inhibitory nucleic acid is introduced into preformed liposomes or lipoplexes made of mixtures of cationic lipids and neutral lipids. In certain methods, inhibitory nucleic acid complexes with mono- or poly-cationic lipids are formed without the presence of a neutral lipid. In certain embodiments, a lipid moiety is selected to increase distribution of an inhibitory nucleic acid to a particular cell or tissue in a mammal. In some examples, a lipid moiety is selected to increase distribution of an inhibitory nucleic acid to fat tissue in a mammal. In certain embodiments, a lipid moiety is selected to increase distribution of an inhibitory nucleic acid to muscle tissue.

[0484] In certain embodiments, pharmaceutical compositions provided herein can include one or more inhibitory nucleic acid and one or more excipients. In certain such embodiments, excipients are selected from water, salt solutions, alcohol, polyethylene glycols, gelatin, lactose, amylase, magnesium stearate, talc, silicic acid, viscous paraffin, hydroxymethylcellulose, and polyvinylpyrrolidone.

[0485] In some examples, a pharmaceutical composition provided herein includes liposomes and emulsions. Liposomes and emulsions can be used to formulate hydrophobic compounds. In some examples, certain organic solvents, such as dimethylsulfoxide, are used.

[0486] In some examples, a pharmaceutical composition provided herein includes one or more tissue-specific delivery molecules designed to deliver one or more inhibitory nucleic acids to specific tissues or cell types in a mammal. For example, a pharmaceutical composition can include liposomes coated with a tissue-specific antibody.

[0487] In some embodiments, a pharmaceutical composition provided herein can include a co-solvent system. Examples of such co-solvent systems include benzyl alcohol, a nonpolar surfactant, a water-miscible organic polymer, and an aqueous phase. A non-limiting example of such a co-solvent system is the VPD co-solvent system, which is a solution of absolute ethanol comprising 3% w/v benzyl alcohol, 8% w/v of the nonpolar surfactant Polysorbate 80™ and 65% w/v polyethylene glycol 300. As can be appreciated, other surfactants may be used instead of Polysorbate 80™; the fraction size of polyethylene glycol may be varied; other biocompatible polymers may replace polyethylene glycol, e.g., polyvinyl pyrrolidone; and other sugars or polysaccharides may substitute for dextrose. Any of the pharmaceutical compositions described herein can be delivered locally to a subject using any of the devices described herein.

[0488] In some examples, an inhibitory nucleic acid can be formulated to include a carrier and is formulated in aqueous solution, such as water or physiologically compatible buffers such as Hanks's solution, Ringer's solution, or physiological saline buffer. In some examples, other ingredients are included (e.g., ingredients that aid in solubility or serve as preservatives). In some examples, an inhibitory nucleic acid can be formulated as a suspension and can be prepared using appropriate liquid carriers, suspending agents, and the like. An inhibitory nucleic acid can be formulated as a suspension, solution, or emulsion in oily or aqueous vehicles prior to intrathecal administration using any of the devices described herein, and may contain formulatory agents such as suspending, stabilizing, and/or dispersing agents. Solvents suitable for formulating an inhibitory nucleic acid include, but are not limited to, lipophilic solvents and fatty oils, such as sesame oil, synthetic fatty acid esters, such as ethyl oleate or triglycerides, and liposomes.

### Antibodies

[0489] In some embodiments, the CD40/CD40L inhibitor is an antibody or an antigen-binding fragment thereof (e.g., a Fab or a scFv). In some embodiments, an antibody or antigen-binding fragment described herein binds specifically to CD40 or CD40L, or to both CD40 and CD40L.

[0490] In some embodiments, the antibody can be a humanized antibody, a chimeric antibody, a multivalent antibody, or a fragment thereof. In some embodiments, an antibody can be a scFv-Fc (Sokolowska-Wedzina et al., Mol. Cancer Res. 15(8):1040-1050, 2017), a VHH domain (Li et al., Immunol. Lett. 188:89-95, 2017), a VNAR domain (Hasler et al., Mol. Immunol. 75:28-37, 2016), a (scFv)2, a minibody (Kim et al., PLoS One 10(1):e113442, 2014), or a BiTE. In some embodiments, an antibody can be a DVD-Ig (Wu et al., Nat. Biotechnol. 25(11):1290-1297, 2007; WO 08/024188; WO 07/024715), and a dual-affinity re-targeting antibody (DART) (Tsai et al., Mol. Ther. Oncolytics 3:15024, 2016), a triomab (Chelius et al., MAbs 2(3):309-319, 2010), kih IgG with a common LC (Kontermann et al., Drug Discovery Today 20(7):838-847, 2015), a crossmab (Regula et al., EMBO Mol. Med. 9(7):985, 2017), an ortho-Fab IgG (Kontermann et al., Drug Discovery Today 20(7):838-847, 2015), a 2-in-1-IgG (Kontermann et al., Drug Discovery Today 20(7):838-847, 2015), IgG-scFv (Cheal et al., Mol. Cancer Ther. 13(7):1803-1812, 2014), scFv2-Fc (Natsume et al., J. Biochem. 140(3):359-368, 2006), a bi-nanobody (Kontermann et al., Drug Discovery Today 20(7):838-847, 2015), tanden antibody (Kontermann et al., Drug Discovery Today 20(7):838-847, 2015), a DART-Fc (Kontermann et al., Drug Discovery Today 20(7):838-847, 2015), a scFv-HSA-scFv (Kontermann et al., Drug Discovery Today 20(7):838-847, 2015), DNL-Fab3 (Kontermann et al., Drug Discovery Today 20(7):838-847, 2015), DAF (two-in-one or four-in-one), DutaMab, DT-IgG, knobs-in-holes common LC, knobs-in-holes assembly, charge pair antibody, Fab-arm exchange antibody, SEEDbody, Triomab, LUZ-Y, Fcab, kλ-body, orthogonal Fab, DVD-IgG, IgG(H)-scFv, scFv-(H)IgG, IgG(L)-scFv, scFv-(L)-IgG, IgG (L,H)-Fc, IgG(H)-V, V(H)—IgG, IgG(L)-V, V(L)-IgG, KIH IgG-scFab, 2scFv-IgG, IgG-2scFv, scFv4-Ig, Zybody, DVI-IgG, nanobody (e.g., antibodies derived from Camelus bactriamus, Calelus dromaderius, or Lama paccos) (U.S. Pat. No. 5,759,808; Stijlemans et al., J. Biol. Chem. 279:1256-1261, 2004; Dumoulin et al., Nature 424:783-788, 2003; and Pleschberger et al., Bioconjugate Chem. 14:440-448, 2003), nanobody-HSA, a diabody (e.g., Poljak, Structure 2(12):1121-1123, 1994; Hudson et al., J. Immunol. Methods 23(1-2):177-189, 1999), a TandAb (Reusch et al., mAbs 6(3):727-738, 2014), scDiabody (Cuesta et al., Trends in Biotechnol. 28(7):355-362, 2010), scDiabody-CH3 (Sanz et al., Trends in Immunol. 25(2):85-91, 2004), Diabody-CH3 (Guo et al., Triple Body, miniantibody, minibody, TriBi minibody, scFv-CH3 KIH, Fab-scFv, scFv-CH-CL-scFv, F(ab′)2-scFV2, scFv-KIH, Fab-scFv-Fc, tetravalent HCAb, scDiabody-Fc, diabody-Fc, tandem scFv-Fc, intrabody (Huston et al., Human Antibodies 10(3-4):127-142, 2001; Wheeler et al., Mol. Ther. 8(3):355-366, 2003; Stocks, Drug Discov. Today 9(22):960-966, 2004), dock and lock bispecific antibody, ImmTAC, HSAbody, scDiabody-HSA, tandem scFv, IgG-IgG, Cov-X-Body, and scFv1-PEG-scFv2.

[0491] Non-limiting examples of an antigen-binding fragment of an antibody include an Fv fragment, a Fab fragment, a F(ab′)₂ fragment, and a Fab′ fragment. Additional examples of an antigen-binding fragment of an antibody is an antigen-binding fragment of an IgG (e.g., an antigen-binding fragment of IgG1, IgG2, IgG3, or IgG4) (e.g., an antigen-binding fragment of a human or humanized IgG, e.g., human or humanized IgG1, IgG2, IgG3, or IgG4); an antigen-binding fragment of an IgA (e.g., an antigen-binding fragment of IgA1 or IgA2) (e.g., an antigen-binding fragment of a human or humanized IgA, e.g., a human or humanized IgA1 or IgA2); an antigen-binding fragment of an IgD (e.g., an antigen-binding fragment of a human or humanized IgD); an antigen-binding fragment of an IgE (e.g., an antigen-binding fragment of a human or humanized IgE); or an antigen-binding fragment of an IgM (e.g., an antigen-binding fragment of a human or humanized IgM).

[0492] In some embodiments, an antibody can be an IgNAR, a bispecific antibody (Milstein and Cuello, Nature 305:537-539, 1983; Suresh et al., Methods in Enzymology 121:210, 1986; WO 96/27011; Brennan et al., Science 229:81, 1985; Shalaby et al., J. Exp. Med. 175:217-225, 1992; Kolstelny et al., J. Immunol. 148(5):1547-1553, 1992; Hollinger et al., Proc. Nat. Acad. Sci. U.S.A. 90:6444-6448, 1993; Gruber et al., J. Immunol. 152:5368, 1994; Tutt et al., J. Immunol. 147:60, 1991), a bispecific diabody, a triabody (Schoonooghe et al., BMC Biotechnol. 9:70, 2009), a tetrabody, scFv-Fc knobs-into-holes, a scFv-Fc-scFv, a (Fab′scFv)₂, a V-IgG, a IvG-V, a dual V domain IgG, a heavy chain immunoglobulin or a camelid (Holt et al., Trends Biotechnol. 21(11):484-490, 2003), an intrabody, a monoclonal antibody (e.g., a human or humanized monoclonal antibody), a heteroconjugate antibody (e.g., U.S. Pat. No. 4,676,980), a linear antibody (Zapata et al., Protein Eng. 8(10:1057-1062, 1995), a trispecific antibody (Tutt et al., J. Immunol. 147:60, 1991), a Fabs-in-Tandem immunoglobulin (WO 15/103072), or a humanized camelid antibody.

[0493] In some embodiments, the antibody is a humanized antibody, a chimeric antibody, a multivalent antibody, or a fragment thereof. In some embodiments, the antibody is a monoclonal antibody. In some embodiments, the antibody is a humanized monoclonal antibody. See e.g., Hunter & Jones, Nat. Immunol. 16:448-457, 2015; Heo et al., Oncotarget 7(13):15460-15473, 2016. Additional examples of antibodies and antigen-binding fragments thereof are described in U.S. Pat. Nos. 8,440,196; 7,842,144; 8,034,344; and 8,529,895; US 2013/0317203; US 2014/0322239; US 2015/0166666; US 2016/0152714; and US 2017/0002082, each of which is incorporated by reference in its entirety.

[0494] In certain embodiments, the antibody comprises or consists of an antigen-binding fragment or portion of PG102 (Pangenetics) (Bankert et al., J. Immunol. 194(9):4319-4327, 2015); 2C10 (Lowe et al., Am. J. Transplant 12(8):2079-2087, 2012); ASKP1240 (Bleselumab) (Watanabe et al., Am. J. Transplant 13(8):1976-1988, 2013); 4D11 (Imai et al., Transplantation 84(8):1020-1028, 2007); BI 655064 (Boehringer Ingelheim) (Visvanathan et al., 2016 American College of Rheumatology Annual Meeting, Abstract 1588, Sep. 28, 2016); 5D12 (Kasran et al., Aliment. Pharmacol. Ther., 22(2):111-122, 2005; Boon et al., Toxicology 174(1):53-65, 2002); ruplizumab (hu5c8) (Kirk et al., Nat. Med. 5(6):686-693, 1999); CHIR12.12 (HCD122) (Weng et al., Blood 104(11):3279, 2004; Tai et al., Cancer Res. 65(13):5898-5906, 2005); CDP7657 (Shock et al., Arthritis Res. Ther. 17(1):234, 2015); BMS-986004 domain antibody (dAb) (Kim et al., Am. J. Transplant. 17(5):1182-1192, 2017); 5c8 (Xie et al., J Immunol. 192(9):4083-4092, 2014); dacetuzumab (SGN-40) (Lewis et al., Leukemia 25(6):1007-1016, 2011; and Khubchandani et al., Curr. Opin. Investig. Drugs 10(6):579-587, 2009); lucatumumab (HCD122) (Bensinger et al., Br. J. Haematol. 159: 58-66, 2012; and Byrd et al., Leuk. Lymphoma 53(11): 10.3109/10428194.2012.681655, 2012); PG102 (FFP104) (Bankert et al., J. Immunol. 194(9):4319-4327, 2015); Chi Lob 7/4 (Johnson et al., J. Clin. Oncol. 28:2507, 2019); and ASKP1240 (Okimura et al., Am. J. Transplant. 14(6): 1290-1299, 2014; or Ma et al., Transplantation 97(4): 397-404, 2014).

[0495] Further teachings of CD40/CD40L antibodies and antigen-binding fragments thereof are described in, for example, U.S. Pat. Nos. 5,874,082; 7,169,389; 7,271,152; 7,288,252; 7,445,780; 7,537,763, 8,277,810; 8,293,237, 8,551,485; 8,591,900; 8,647,625; 8,784,823; 8,852,597; 8,961,976; 9,023,360, 9,028,826; 9,090,696, 9,221,913; US2014/0093497; and US2015/0017155 each of which is incorporated by reference in its entirety.

[0496] In some embodiments, any of the antibodies or antigen-binding fragments described herein has a dissociation constant (K_{D}) of less than 1×10⁻⁵ M (e.g., less than 0.5×10⁻⁵ M, less than 1×10⁻⁶ M, less than 0.5×10⁻⁶ M, less than 1×10⁻⁷ M, less than 0.5×10⁻⁷ M, less than 1×10⁻⁸ M, less than 0.5×10⁻⁸ M, less than 1×10⁻⁹ M, less than 0.5×10⁻⁹ M, less than 1×10⁻¹⁰ M, less than 0.5×10⁻¹⁰ M, less than 1×10⁻¹¹ M, less than 0.5×10⁻¹¹ M, or less than 1×10⁻¹² M), e.g., as measured in phosphate buffered saline using surface plasmon resonance (SPR).

[0497] In some embodiments, any of the antibodies or antigen-binding fragments described herein has a K_{D} of about 1×10⁻¹² M to about 1×10⁻⁵ M, about 0.5×10⁻⁵ M, about 1×10⁻⁶ M, about 0.5×10⁻⁶ M, about 1×10⁻⁷ M, about 0.5×10⁻⁷ M, about 1×10⁻⁸ M, about 0.5×10⁻⁸ M, about 1×10⁻⁹ M, about 0.5×10⁻⁹ M, about 1×10⁻¹⁰ M, about 0.5×10⁻¹⁰ M, about 1×10⁻¹¹ M, or about 0.5×10⁻¹¹ M (inclusive); about 0.5×10⁻¹¹ M to about 1×10⁻⁵ M, about 0.5×10⁻⁵ M, about 1×10⁻⁶ M, about 0.5×10⁻⁶ M, about 1×10⁻⁷ M, about 0.5×10⁻⁷ M, about 1×10⁻⁸ M, about 0.5×10⁻⁸ M, about 1×10⁻⁹ M, about 0.5×10⁻⁹ M, about 1×10⁻¹⁰ M, about 0.5×10⁻¹⁰ M, or about 1×10⁻¹¹ M (inclusive); about 1×10⁻¹¹ M to about 1×10⁻⁵ M, about 0.5×10⁻⁵ M, about 1×10⁻⁶ M, about 0.5×10⁻⁶ M, about 1×10⁻⁷ M, about 0.5×10⁻⁷ M, about 1×10⁻⁸ M, about 0.5×10⁻⁸ M, about 1×10⁻⁹ M, about 0.5×10⁻⁹ M, about 1×10⁻¹⁰ M, or about 0.5×10⁻¹⁰ M (inclusive); about 0.5×10⁻¹⁰ M to about 1×10⁻⁵ M, about 0.5×10⁻⁵ M, about 1×10⁻⁶ M, about 0.5×10⁻⁶ M, about 1×10⁻⁷ M, about 0.5×10⁻⁷ M, about 1×10⁻⁸ M, about 0.5×10⁻⁸ M, about 1×10⁻⁹ M, about 0.5×10⁻⁹ M, or about 1×10⁻¹⁰ M (inclusive); about 1×10⁻¹⁰ M to about 1×10⁻⁵ M, about 0.5×10⁻⁵ M, about 1×10⁻⁶ M, about 0.5×10⁻⁶ M, about 1×10⁻⁷ M, about 0.5×10⁻⁷ M, about 1×10⁻⁸ M, about 0.5×10⁻⁸ M, about 1×10⁻⁹ M, or about 0.5×10⁻⁹ M (inclusive); about 0.5×10⁻⁹ M to about 1×10⁻⁵ M, about 0.5×10⁻⁵ M, about 1×10⁻⁶ M, about 0.5×10⁻⁶ M, about 1×10⁻⁷ M, about 0.5×10⁻⁷ M, about 1×10⁻⁸ M, about 0.5×10⁻⁸ M, or about 1×10⁻⁹ M (inclusive); about 1×10⁻⁹ M to about 1×10⁻⁵ M, about 0.5×10⁻⁵ M, about 1×10⁻⁶ M, about 0.5×10⁻⁶ M, about 1×10⁻⁷ M, about 0.5×10⁻⁷ M, about 1×10⁻⁸ M, or about 0.5×10⁻⁸ M (inclusive); about 0.5×10⁻⁸ M to about 1×10⁻⁵ M, about 0.5×10⁻⁵ M, about 1×10⁻⁶ M, about 0.5×10⁻⁶ M, about 1×10⁻⁷ M, about 0.5×10⁻⁷ M, or about 1×10⁻⁸ M (inclusive); about 1×10⁻⁸ M to about 1×10⁻⁵ M, about 0.5×10⁻⁵ M, about 1×10⁻⁶ M, about 0.5×10⁻⁶ M, about 1×10⁻⁷ M, or about 0.5×10⁻⁷ M (inclusive); about 0.5×10⁻⁷ M to about 1×10⁻⁵ M, about 0.5×10⁻⁵ M, about 1×10⁻⁶ M, about 0.5×10⁻⁶ M, or about 1×10⁻⁷ M (inclusive); about 1×10⁻⁷ M to about 1×10⁻⁵ M, about 0.5×10⁻⁵ M, about 1×10⁻⁶ M, or about 0.5×10⁻⁶ M (inclusive); about 0.5×10⁻⁶ M to about 1×10⁻⁵ M, about 0.5×10⁻⁵ M, or about 1×10⁻⁶ M (inclusive); about 1×10⁻⁶ M to about 1×10⁻⁵ M or about 0.5×10⁻⁵ M (inclusive); or about 0.5×10⁻⁵ M to about 1×10⁻⁵ M (inclusive), e.g., as measured in phosphate buffered saline using surface plasmon resonance (SPR).

[0498] In some embodiments, any of the antibodies or antigen-binding fragments described herein has a K_{off} of about 1×10⁻⁶ s⁻¹ to about 1×10⁻³ s⁻¹, about 0.5×10⁻³ s⁻¹, about 1×10⁻⁴ s⁻¹, about 0.5×10⁻⁴ s⁻¹, about 1×10⁻⁵ s⁻¹, or about 0.5×10⁻⁵ s⁻¹ (inclusive); about 0.5×10⁻⁵ s⁻¹ to about 1×10⁻³ s⁻¹, about 0.5×10⁻³ s⁻¹, about 1×10⁻⁴ s⁻¹, about 0.5×10⁻⁴ s⁻¹, or about 1×10⁻⁵ s⁻¹ (inclusive); about 1×10⁻⁵ s⁻¹ to about 1×10⁻³ s⁻¹, about 0.5×10⁻³ s⁻¹, about 1×10⁻⁴ s⁻¹, or about 0.5×10⁻⁴ s⁻¹ (inclusive); about 0.5×10⁻⁴ s⁻¹ to about 1×10⁻³ s⁻¹, about 0.5×10⁻³ s⁻¹, or about 1×10⁻⁴ s⁻¹ (inclusive); about 1×10⁻⁴ s⁻¹ to about 1×10⁻³ s⁻¹, or about 0.5×10⁻³ s⁻¹ (inclusive); or about 0.5×10⁻⁵ s⁻¹ to about 1×10⁻³ s⁻¹ (inclusive), e.g., as measured in phosphate buffered saline using surface plasmon resonance (SPR).

[0499] In some embodiments, any of the antibodies or antigen-binding fragments described herein has a Kₒₙ of about 1×10² M⁻ⁱs⁻¹ to about 1×10⁶ M⁻¹s⁻¹, about 0.5×10⁶ M⁻¹s⁻¹, about 1×10⁵ M⁻¹s⁻¹, about 0.5×10⁵ M⁻¹s⁻¹, about 1×10⁴ M⁻¹s⁻¹, about 0.5×10⁴ M⁻¹s⁻¹, about 1×10³ M⁻¹s⁻¹, or about 0.5×10³ M⁻¹s⁻¹ (inclusive); about 0.5×10³ M⁻ⁱs⁻¹ to about 1×10⁶ M⁻¹s⁻¹, about 0.5×10⁶ M⁻¹s⁻¹, about 1×10⁵ M⁻¹s⁻¹, about 0.5×10⁵ M⁻¹s⁻¹, about 1×10⁴ M⁻¹s⁻¹, about 0.5×10⁴ M⁻¹s⁻¹, or about 1×10³ M⁻¹s⁻¹ (inclusive); about 1×10³ M⁻¹s⁻¹ to about 1×10⁶ M⁻¹s⁻¹, about 0.5×10⁶ M⁻¹s⁻¹, about 1×10⁵ M⁻¹s⁻¹, about 0.5×10⁵ M⁻ⁱs¹, about 1×10⁴ M⁻¹s⁻¹, or about 0.5×10⁴ M⁻¹s⁻¹ (inclusive); about 0.5×10⁴ M⁻¹s⁻¹ to about 1×10⁶ M⁻¹s⁻¹, about 0.5×10⁶ M⁻¹s⁻¹, about 1×10⁵ M⁻¹s⁻¹, about 0.5×10⁵ M⁻¹s⁻¹, or about 1×10⁴ M⁻¹s⁻¹ (inclusive); about 1×10⁴ M⁻¹s⁻¹ to about 1×10⁶ M⁻¹s⁻¹, about 0.5×10⁶ M⁻¹s⁻¹, about 1×10⁵ M⁻¹s⁻¹, or about 0.5×10⁵ M⁻¹s⁻¹ (inclusive); about 0.5×10⁵ M⁻¹s⁻¹ to about 1×10⁶ M⁻¹s⁻¹, about 0.5×10⁶ M⁻¹s⁻¹, or about 1×10⁵ M⁻¹s⁻¹ (inclusive); about 1×10⁵ M⁻¹s⁻¹ to about 1×10⁶ M⁻¹s⁻¹, or about 0.5×10⁶ M⁻¹s⁻¹ (inclusive); or about 0.5×10⁶ M⁻¹s⁻¹ to about 1×10⁶ M⁻¹s⁻¹ (inclusive), e.g., as measured in phosphate buffered saline using surface plasmon resonance (SPR).

### Fusion and Truncated Proteins and Peptides

[0500] In some embodiments, the CD40/CD40L inhibitor is a fusion protein, a truncated protein (e.g., a soluble receptor) or a peptide. In some embodiments, the CD40/CD40L inhibitor is a truncated protein as disclosed in, for example, WO 01/096397. In some embodiments, the CD40/CD40L inhibitor is a peptide, such as a cyclic peptide (see, e.g., U.S. Pat. No. 8,802,634; Bianco et al., Org. Biomol. Chem. 4:1461-1463, 2006; Deambrosis et al., J. Mol. Med. 87(2):181-197, 2009; Vaitaitis et al., Diabetologia 57(11):2366-2373, 2014). In some embodiments, the CD40/CD40L inhibitor is a CD40 ligand binder, for example, a Tumor Necrosis Factor Receptor-associated Factor (TRAF): TRAF2, TRAF3, TRAF6, TRAF5 and TTRAP, or E3 ubiquitin-protein ligase RNF128.

### Small Molecules

[0501] In some embodiments, the CD40/CD40L inhibitor is a small molecule (see, e.g., U.S. Pat. No. 7,173,046, U.S. Patent Application No. 2011/0065675). In some embodiments, the small molecule is Bio8898 (Silvian et al., ACS Chem. Biol. 6(6):636-647, 2011); Suramin (Margolles-Clark et al., Biochem. Pharmacol. 77(7):1236-1245, 2009); a small-molecule organic dye (Margolles-Clark et al., J. Mol. Med. 87(11):1133-1143, 2009; Buchwald et al., J. Mol. Recognit. 23(1):65-73, 2010), a naphthalenesulphonic acid derivative (Margolles-Clark et al., Chem. Biol. Drug Des. 76(4):305-313, 2010), or a variant thereof.

### CD3 Inhibitors

[0502] The term “CD3 inhibitor” refers to an agent which decreases the ability of one or more of CD3γ, CD3δ, CD3ε, and CD3ζ to associate with one or more of TCR-α, TCR-β, TCR-δ, and TCR-γ. In some embodiments, the CD3 inhibitor can decrease the association between one or more of CD3γ, CD3δ, CD3ε, and CD3ζ and one or more of TCR-α, TCR-β, TCR-δ, and TCR-γ by blocking the ability of one or more of CD3γ, CD3δ, CD3ε, and CD3ζ to interact with one or more of TCR-α, TCR-β, TCR-δ, and TCR-γ.

[0503] In some embodiments, the CD3 inhibitor is an antibody or an antigen-binding fragment thereof, a fusion protein, or a small molecule. Exemplary CD3 inhibitors are described herein. Additional examples of CD3 inhibitors are known in the art.

[0504] Exemplary sequences for human CD3γ, human CD3δ, human CD3ε, and human CD3ζ are shown below.

Human CD3γ
(SEQ ID NO: 62)
meqgkglavl ilaiillqgt laqsikgnhl vkvydyqedg
sylltcdaea knitwfkdgk migfltedkk kwnlgsnakd
prgmyqckgs qnkskplqvy yrmcqnciel naatisgflf
aeivsifvla vgvyfiagqd gvrqsrasdk qtllpndqly
qplkdreddq yshlqgnqlr rn
Human CD3δ Isoform A
(SEQ ID NO: 63)
fkipieele drvfvncnts itwvegtvgt llsditrldl
gkrildprgi yrcngtdiyk dkestvqvhy rmcqscveld
patvagiivt dviatlllal gvfcfaghet grlsgaadtq
allrndqvyq plrdrddaqy shlggnwarn k
Human CD3δ Isoform B
(SEQ ID NO: 64)
fkipieele drvfvncnts itwvegtvgt llsditrldl
gkrildprgi yrcngtdiyk dkestvqvhy rtadtqallr
ndqvyqpird rddaqyshlg gnwarnk
Human CD3ϵ
(SEQ ID NO: 65)
dgneemgg itqtpykvsi sgttviltcp qypgseilwq
hndkniggde ddknigsded hlslkefsel eqsgyyvcyp
rgskpedanf ylylrarvce ncmemdvmsv ativivdici
tggllllvyy wsknrkakak pvtrgagagg rqrgqnkerp
ppvpnpdyep irkgqrdlys glnqrri
Human CD3ζ Isoform 1
(SEQ ID NO: 66)
qsfglldpk lcylldgilf iygviltalf lrvkfsrsad
apayqqgqnq lynelnlgrr eeydvldkrr grdpemggkp
qrrknpqegl ynelqkdkma eayseigmkg errrgkghdg
lyqglstatk dtydalhmqa lppr
Human CD3ζ Isoform 2
(SEQ ID NO: 67)
qsfglldpk lcylldgilf iygviltalf lrvkfsrsad
apayqqgqnq lynelnlgrr eeydvldkrr grdpemggkp
rrknpqegly nelqkdkmae ayseigmkge rrrgkghdgl
yqglstatkd tydalhmqal ppr

### Antibodies

[0505] In some embodiments, the CD3 inhibitor is an antibody or an antigen-binding fragment thereof (e.g., a Fab or a scFv). In some embodiments, the CD3 inhibitor is an antibody or antigen-binding fragment that binds specifically to CD3γ. In some embodiments, the CD3 inhibitor is an antibody or antigen-binding fragment that binds specifically to CD3δ. In some embodiments, the CD3 inhibitor is an antibody or antigen-binding fragment that binds specifically to CD3ε. In some embodiments, the CD3 inhibitor is an antibody or antigen-binding fragment that binds specifically to CD3. In some embodiments, the CD3 inhibitor is an antibody or an antigen-binding fragment that can bind to two or more (e.g., two, three, or four) of CD3γ, CD3δ, CD3ε, and CD3ζ.

[0506] In some embodiments, the antibody can be a humanized antibody, a chimeric antibody, a multivalent antibody, or a fragment thereof. In some embodiments, an antibody can be a scFv-Fc (Sokolowska-Wedzina et al., Mol. Cancer Res. 15(8):1040-1050, 2017), a VHH domain (Li et al., Immunol. Lett. 188:89-95, 2017), a VNAR domain (Hasler et al., Mol. Immunol. 75:28-37, 2016), a (scFv)₂, a minibody (Kim et al., PLoS One 10(1):e113442, 2014), or a BiTE. In some embodiments, an antibody can be a DVD-Ig (Wu et al., Nat. Biotechnol. 25(11):1290-1297, 2007; WO 08/024188; WO 07/024715), and a dual-affinity re-targeting antibody (DART) (Tsai et al., Mol. Ther. Oncolytics 3:15024, 2016), a triomab (Chelius et al., MAbs 2(3):309-319, 2010), kih IgG with a common LC (Kontermann et al., Drug Discovery Today 20(7):838-847, 2015), a crossmab (Regula et al., EMBO Mol. Med. 9(7):985, 2017), an ortho-Fab IgG (Kontermann et al., Drug Discovery Today 20(7):838-847, 2015), a 2-in-1-IgG (Kontermann et al., Drug Discovery Today 20(7):838-847, 2015), IgG-scFv (Cheal et al., Mol. Cancer Ther. 13(7):1803-1812, 2014), scFv2-Fc (Natsume et al., J. Biochem. 140(3):359-368, 2006), a bi-nanobody (Kontermann et al., Drug Discovery Today 20(7):838-847, 2015), tanden antibody (Kontermann et al., Drug Discovery Today 20(7):838-847, 2015), a DART-Fc (Kontermann et al., Drug Discovery Today 20(7):838-847, 2015), a scFv-HSA-scFv (Kontermann et al., Drug Discovery Today 20(7):838-847, 2015), DNL-Fab3 (Kontermann et al., Drug Discovery Today 20(7):838-847, 2015), DAF (two-in-one or four-in-one), DutaMab, DT-IgG, knobs-in-holes common LC, knobs-in-holes assembly, charge pair antibody, Fab-arm exchange antibody, SEEDbody, Triomab, LUZ-Y, Fcab, kλ-body, orthogonal Fab, DVD-IgG, IgG(H)-scFv, scFv-(H)IgG, IgG(L)-scFv, scFv-(L)-IgG, IgG (L,H)-Fc, IgG(H)-V, V(H)—IgG, IgG(L)-V, V(L)-IgG, KIH IgG-scFab, 2scFv-IgG, IgG-2scFv, scFv4-Ig, Zybody, DVI-IgG, nanobody (e.g., antibodies derived from Camelus bactriamus, Calelus dromaderius, or Lama paccos) (U.S. Pat. No. 5,759,808; Stijlemans et al., J. Biol. Chem. 279:1256-1261, 2004; Dumoulin et al., Nature 424:783-788, 2003; and Pleschberger et al., Bioconjugate Chem. 14:440-448, 2003), nanobody-HSA, a diabody (e.g., Poljak, Structure 2(12):1121-1123, 1994; Hudson et al., J. Immunol. Methods 23(1-2):177-189, 1999), a TandAb (Reusch et al., mAbs 6(3):727-738, 2014), scDiabody (Cuesta et al., Trends in Biotechnol. 28(7):355-362, 2010), scDiabody-CH3 (Sanz et al., Trends in Immunol. 25(2):85-91, 2004), Diabody-CH3 (Guo et al., Triple Body, miniantibody, minibody, TriBi minibody, scFv-CH3 KIH, Fab-scFv, scFv-CH-CL-scFv, F(ab′)2-scFV2, scFv-KIH, Fab-scFv-Fc, tetravalent HCAb, scDiabody-Fc, diabody-Fc, tandem scFv-Fc, intrabody (Huston et al., Human Antibodies 10(3-4):127-142, 2001; Wheeler et al., Mol. Ther. 8(3):355-366, 2003; Stocks, Drug Discov. Today 9(22):960-966, 2004), dock and lock bispecific antibody, ImmTAC, HSAbody, scDiabody-HSA, tandem scFv, IgG-IgG, Cov-X-Body, and scFv1-PEG-scFv2.

[0507] Non-limiting examples of an antigen-binding fragment of an antibody include an Fv fragment, a Fab fragment, a F(ab′)₂ fragment, and a Fab′ fragment. Additional examples of an antigen-binding fragment of an antibody is an antigen-binding fragment of an IgG (e.g., an antigen-binding fragment of IgG1, IgG2, IgG3, or IgG4) (e.g., an antigen-binding fragment of a human or humanized IgG, e.g., human or humanized IgG1, IgG2, IgG3, or IgG4); an antigen-binding fragment of an IgA (e.g., an antigen-binding fragment of IgA1 or IgA2) (e.g., an antigen-binding fragment of a human or humanized IgA, e.g., a human or humanized IgA1 or IgA2); an antigen-binding fragment of an IgD (e.g., an antigen-binding fragment of a human or humanized IgD); an antigen-binding fragment of an IgE (e.g., an antigen-binding fragment of a human or humanized IgE); or an antigen-binding fragment of an IgM (e.g., an antigen-binding fragment of a human or humanized IgM).

[0508] In some embodiments, an antibody can be an IgNAR, a bispecific antibody (Milstein and Cuello, Nature 305:537-539, 1983; Suresh et al., Methods in Enzymology 121:210, 1986; WO 96/27011; Brennan et al., Science 229:81, 1985; Shalaby et al., J. Exp. Med. 175:217-225, 1992; Kolstelny et al., J. Immunol. 148(5):1547-1553, 1992; Hollinger et al., Proc. Nat. Acad. Sci. U.S.A. 90:6444-6448, 1993; Gruber et al., J. Immunol. 152:5368, 1994; Tutt et al., J. Immunol. 147:60, 1991), a bispecific diabody, a triabody (Schoonooghe et al., BMC Biotechnol. 9:70, 2009), a tetrabody, scFv-Fc knobs-into-holes, a scFv-Fc-scFv, a (Fab′scFv)₂, a V-IgG, a IvG-V, a dual V domain IgG, a heavy chain immunoglobulin or a camelid (Holt et al., Trends Biotechnol. 21(11):484-490, 2003), an intrabody, a monoclonal antibody (e.g., a human or humanized monoclonal antibody), a heteroconjugate antibody (e.g., U.S. Pat. No. 4,676,980), a linear antibody (Zapata et al., Protein Eng. 8(10:1057-1062, 1995), a trispecific antibody (Tutt et al., J. Immunol. 147:60, 1991), a Fabs-in-Tandem immunoglobulin (WO 15/103072), or a humanized camelid antibody.

[0509] In some embodiments, the antibody is a humanized antibody, a chimeric antibody, a multivalent antibody, or a fragment thereof. In some embodiments, the antibody is a monoclonal antibody. In some embodiments, the antibody is a humanized monoclonal antibody. See e.g., Hunter & Jones, Nat. Immunol. 16:448-457, 2015; Heo et al., Oncotarget 7(13):15460-15473, 2016. Additional examples of antibodies and antigen-binding fragments thereof are described in U.S. Pat. Nos. 8,440,196; 7,842,144; 8,034,344; and 8,529,895; US 2013/0317203; US 2014/0322239; US 2015/0166666; US 2016/0152714; and US 2017/0002082, each of which is incorporated by reference in its entirety.

[0510] In certain embodiments, the antibody comprises or consists of an antigen-binding fragment or portion of visiluzumab (Nuvion; HuM-291; M291; SMART anti-CD3 antibody) (Carpenter et al., Biol. Blood Marrow Transplant 11(6): 465-471, 2005; Trajkovic Curr. Opin. Investig. Drugs 3(3): 411-414, 2002; Malviya et al., J. Nucl. Med. 50(10): 1683-1691, 2009); muromonab-CD3 (orthoclone OKT3) (Hori et al., Surg. Today 41(4): 585-590, 2011; Norman Ther. Drug Monit. 17(6): 615-620, 1995; and Gramatzki et al., Leukemia 9(3): 382-390, 19); otelixizumab (TRX4) (Vossenkamper et al., Gastroenterology 147(1): 172-183, 2014; and Wiczling et al., J. Clin. Pharmacol. 50(5): 494-506, 2010); foralumab (NI-0401) (Ogura et al., Clin. Immunol. 183: 240-246; and van der Woude et al., Inflamm. Bowel Dis. 16: 1708-1716, 2010); ChAgly CD3; teplizumab (MGA031) (Waldron-Lynch et al., Sci. Transl. Med. 4(118): 118ra12, 2012; and Skelley et al., Ann. Pharmacother 46(10): 1405-1412, 2012); or catumaxomab (Removab®) (Linke et al., Mabs 2(2): 129-136, 2010; and Bokemeyer et al., Gastric Cancer 18(4): 833-842, 2015).

[0511] Additional examples of CD3 inhibitors that are antibodies or antibody fragments are described in, e.g., U.S. Patent Application Publication Nos. 2017/0204194, 2017/0137519, 2016/0368988, 2016/0333095, 2016/0194399, 2016/0168247, 2015/0166661, 2015/0118252, 2014/0193399, 2014/0099318, 2014/0088295, 2014/0080147, 2013/0115213, 2013/0078238, 2012/0269826, 2011/0217790, 2010/0209437, 2010/0183554, 2008/0025975, 2007/0190045, 2007/0190052, 2007/0154477, 2007/0134241, 2007/0065437, 2006/0275292, 2006/0269547, 2006/0233787, 2006/0177896, 2006/0165693, 2006/0088526, 2004/0253237, 2004/0202657, 2004/0052783, 2003/0216551, and 2002/0142000, each of which is herein incorporated by reference in its entirety (e.g., the sections describing the CD3 inhibitors). Additional CD3 inhibitors that are antibodies or antigen-binding antibody fragments are described in, e.g., Smith et al., J. Exp. Med. 185(8):1413-1422, 1997; Chatenaud et al., Nature 7:622-632, 2007.

[0512] In some embodiments, the CD3 inhibitor comprises or consists of a bispecific antibody (e.g., JNJ-63709178) (Gaudet et al., Blood 128(22): 2824, 2016); JNJ-64007957 (Girgis et al., Blood 128: 5668, 2016); MGDO09 (Tolcher et al., J. Clin. Oncol. 34:15, 2016); ERY974 (Ishiguro et al., Sci. Transl. Med. 9(410): pii.eaa4291, 2017); AMV564 (Hoseini and Cheung Blood Cancer J. 7:e522, 2017); AFM11 (Reusch et al., MAbs 7(3): 584-604, 2015); duvortuxizumab (JNJ 64052781); R06958688; blinatumomab (Blincyto®; AMG103) (Ribera Expert Rev. Hematol. 1:1-11, 2017; and Mori et al., N Engl. J. Med. 376(23):e49, 2017); XmAb13676; or REGN1979 (Bannerji et al., Blood 128: 621, 2016; and Smith et al., Sci. Rep. 5:17943, 2015)).

[0513] In some embodiments, the CD3 inhibitor comprises or consists of a trispecific antibody (e.g., ertumaxomab (Kiewe and Thiel, Expert Opin. Investig. Drugs 17(10): 1553-1558, 2008; and Haense et al., BMC Cancer 16:420, 2016); or FBTA05 (Bi20; Lymphomun) (Buhmann et al., J. Transl. Med. 11:160, 2013; and Schuster et al., Br. J Haematol. 169(1): 90-102, 2015)).

[0514] In some embodiments, any of the antibodies or antigen-binding fragments described herein has a dissociation constant (K_{D}) of less than 1×10⁻⁵ M (e.g., less than 0.5×10⁻⁵ M, less than 1×10⁻⁶ M, less than 0.5×10⁻⁶ M, less than 1×10⁻⁷ M, less than 0.5×10⁻⁷ M, less than 1×10⁻⁸ M, less than 0.5×10⁻⁸ M, less than 1×10⁻⁹ M, less than 0.5×10⁻⁹ M, less than 1×10⁻¹⁰ M, less than 0.5×10⁻¹⁰ M, less than 1×10⁻¹¹ M, less than 0.5×10⁻¹¹ M, or less than 1×10⁻¹² M), e.g., as measured in phosphate buffered saline using surface plasmon resonance (SPR).

[0515] In some embodiments, any of the antibodies or antigen-binding fragments described herein has a K_{D} of about 1×10⁻¹² M to about 1×10⁻⁵ M, about 0.5×10⁻⁵ M, about 1×10⁻⁶ M, about 0.5×10⁻⁶ M, about 1×10⁻⁷ M, about 0.5×10⁻⁷ M, about 1×10⁻⁸ M, about 0.5×10⁻⁸ M, about 1×10⁻⁹ M, about 0.5×10⁻⁹ M, about 1×10⁻¹⁰ M, about 0.5×10⁻¹⁰ M, about 1×10⁻¹¹ M, or about 0.5×10⁻¹¹ M (inclusive); about 0.5×10⁻¹¹ M to about 1×10⁻⁵ M, about 0.5×10⁻⁵ M, about 1×10⁻⁶ M, about 0.5×10⁻⁶ M, about 1×10⁻⁷ M, about 0.5×10⁻⁷ M, about 1×10⁻⁸ M, about 0.5×10⁻⁸ M, about 1×10⁻⁹ M, about 0.5×10⁻⁹ M, about 1×10⁻¹⁰ M, about 0.5×10⁻¹⁰ M, or about 1×10⁻¹¹ M (inclusive); about 1×10⁻¹¹ M to about 1×10⁻⁵ M, about 0.5×10⁻⁵ M, about 1×10⁻⁶ M, about 0.5×10⁻⁶ M, about 1×10⁻⁷ M, about 0.5×10⁻⁷ M, about 1×10⁻⁸ M, about 0.5×10⁻⁸ M, about 1×10⁻⁹ M, about 0.5×10⁻⁹ M, about 1×10⁻¹⁰ M, or about 0.5×10⁻¹⁰ M (inclusive); about 0.5×10⁻¹⁰ M to about 1×10⁻⁵ M, about 0.5×10⁻⁵ M, about 1×10⁻⁶ M, about 0.5×10⁻⁶ M, about 1×10⁻⁷ M, about 0.5×10⁻⁷ M, about 1×10⁻⁸ M, about 0.5×10⁻⁸ M, about 1×10⁻⁹ M, about 0.5×10⁻⁹ M, or about 1×10⁻¹⁰ M (inclusive); about 1×10⁻¹⁰ M to about 1×10⁻⁵ M, about 0.5×10⁻⁵ M, about 1×10⁻⁶ M, about 0.5×10⁻⁶ M, about 1×10⁻⁷ M, about 0.5×10⁻⁷ M, about 1×10⁻⁸ M, about 0.5×10⁻⁸ M, about 1×10⁻⁹ M, or about 0.5×10⁻⁹ M (inclusive); about 0.5×10⁻⁹ M to about 1×10⁻⁵ M, about 0.5×10⁻⁵ M, about 1×10⁻⁶ M, about 0.5×10⁻⁶ M, about 1×10⁻⁷ M, about 0.5×10⁻⁷ M, about 1×10⁻⁸ M, about 0.5×10⁻⁸ M, or about 1×10⁻⁹ M (inclusive); about 1×10⁻⁹ M to about 1×10⁻⁵ M, about 0.5×10⁻⁵ M, about 1×10⁻⁶ M, about 0.5×10⁻⁶ M, about 1×10⁻⁷ M, about 0.5×10⁻⁷ M, about 1×10⁻⁸ M, or about 0.5×10⁻⁸ M (inclusive); about 0.5×10⁻⁸ M to about 1×10⁻⁵ M, about 0.5×10⁻⁵ M, about 1×10⁻⁶ M, about 0.5×10⁻⁶ M, about 1×10⁻⁷ M, about 0.5×10⁻⁷ M, or about 1×10⁻⁸ M (inclusive); about 1×10⁻⁸ M to about 1×10⁻⁵ M, about 0.5×10⁻⁵ M, about 1×10⁻⁶ M, about 0.5×10⁻⁶ M, about 1×10⁻⁷ M, or about 0.5×10⁻⁷ M (inclusive); about 0.5×10⁻⁷ M to about 1×10⁻⁵ M, about 0.5×10⁻⁵ M, about 1×10⁻⁶ M, about 0.5×10⁻⁶ M, or about 1×10⁻⁷ M (inclusive); about 1×10⁻⁷ M to about 1×10⁻⁵ M, about 0.5×10⁻⁵ M, about 1×10⁻⁶ M, or about 0.5×10⁻⁶ M (inclusive); about 0.5×10⁻⁶ M to about 1×10⁻⁵ M, about 0.5×10⁻⁵ M, or about 1×10⁻⁶ M (inclusive); about 1×10⁻⁶ M to about 1×10⁻⁵ M or about 0.5×10⁻⁵ M (inclusive); or about 0.5×10⁻⁵ M to about 1×10⁻⁵ M (inclusive), e.g., as measured in phosphate buffered saline using surface plasmon resonance (SPR).

[0516] In some embodiments, any of the antibodies or antigen-binding fragments described herein has a K_{off} of about 1×10⁻⁶ s⁻¹ to about 1×10⁻³ s⁻¹, about 0.5×10⁻³ s⁻¹, about 1×10⁻⁴ s⁻¹, about 0.5×10⁻⁴ s⁻¹, about 1×10⁻⁵ s⁻¹, or about 0.5×10⁻⁵ s⁻¹ (inclusive); about 0.5×10⁻⁵ s⁻¹ to about 1×10⁻³ s⁻¹, about 0.5×10⁻³ s⁻¹, about 1×10⁻⁴ s⁻¹, about 0.5×10⁻⁴ s⁻¹, or about 1×10⁻⁵ s⁻¹ (inclusive); about 1×10⁻⁵ s⁻¹ to about 1×10⁻³ s⁻¹, about 0.5×10⁻³ s⁻¹, about 1×10⁻⁴ s⁻¹, or about 0.5×10⁻⁴ s⁻¹ (inclusive); about 0.5×10⁻⁴ s⁻¹ to about 1×10⁻³ s⁻¹, about 0.5×10⁻³ s⁻¹, or about 1×10⁻⁴ s⁻¹ (inclusive); about 1×10⁻⁴ s⁻¹ to about 1×10⁻³ s⁻¹, or about 0.5×10⁻³ s⁻¹ (inclusive); or about 0.5×10⁻⁵ s⁻¹ to about 1×10⁻³ s⁻¹ (inclusive), e.g., as measured in phosphate buffered saline using surface plasmon resonance (SPR).

[0517] In some embodiments, any of the antibodies or antigen-binding fragments described herein has a Kₒₙ of about 1×10² M⁻¹s⁻¹ to about 1×10⁶ M⁻¹s⁻¹, about 0.5×10⁶ M⁻¹s⁻¹, about 1×10⁵ M⁻¹s⁻¹, about 0.5×10⁵ M⁻¹s⁻¹, about 1×10⁴ M⁻¹s⁻¹, about 0.5×10⁴ M⁻¹s⁻¹, about 1×10³ M⁻¹s⁻¹, or about 0.5×10³ M⁻¹s⁻¹ (inclusive); about 0.5×10³ M⁻¹s⁻¹ to about 1×10⁶ M⁻¹s⁻¹, about 0.5×10⁶ M⁻¹s⁻¹, about 1×10⁵ M⁻¹s⁻¹, about 0.5×10⁵ M⁻¹s⁻¹, about 1×10⁴ M⁻¹s⁻¹, about 0.5×10⁴ M⁻¹s⁻¹, or about 1×10³ M⁻¹s⁻¹ (inclusive); about 1×10³ M⁻¹s⁻¹ to about 1×10⁶ M⁻¹s⁻¹ about 0.5×10⁶ M⁻¹s⁻¹, about 1×10⁵ M⁻¹s⁻¹, about 0.5×10⁵ M⁻¹s⁻¹, about 1×10⁴ M⁻¹s⁻¹, or about 0.5×10⁴ M⁻¹s⁻¹ (inclusive); about 0.5×10⁴ M⁻¹s⁻¹ to about 1×10⁶ M⁻¹s⁻¹, about 0.5×10⁶ M⁻¹s⁻¹, about 1×10⁵ M⁻¹s⁻¹, about 0.5×10⁵ M⁻¹s⁻¹, or about 1×10⁴ M⁻¹s⁻¹ (inclusive); about 1×10⁴ M⁻¹s⁻¹ to about 1×10⁶ M⁻¹s⁻¹, about 0.5×10⁶ M⁻¹s⁻¹, about 1×10⁵ M⁻¹s⁻¹, or about 0.5×10⁵ M⁻¹s⁻¹ (inclusive); about 0.5×10⁵ M⁻¹s⁻¹ to about 1×10⁶ M⁻¹s⁻¹, about 0.5×10⁶ M⁻¹s⁻¹, or about 1×10⁵ M⁻¹s⁻¹ (inclusive); about 1×10⁵ M⁻¹s⁻¹ to about 1×10⁶ M⁻¹s⁻¹, or about 0.5×10⁶ M⁻¹s⁻¹ (inclusive); or about 0.5×10⁶ M⁻¹s⁻¹ to about 1×10⁶ M⁻¹s⁻¹ (inclusive), e.g., as measured in phosphate buffered saline using surface plasmon resonance (SPR).

### Fusion and Truncated Proteins and Peptides

[0518] In some embodiments, the CD3 inhibitor is a fusion protein, a truncated protein (e.g., a soluble receptor), or a peptide. In some embodiments, the CD3 inhibitor can be a fusion protein (see, e.g., Lee et al., Oncol. Rep. 15(5): 1211-1216, 2006).

### Small Molecules

[0519] In some embodiments, the CD3 inhibitor comprises or consists of a bispecific small molecule-antibody conjugate (see, e.g., Kim et al., PNAS 110(44): 17796-17801, 2013; Viola et al., Eur. J. Immunol. 27(11):3080-3083, 1997).

### CD14 Inhibitors

[0520] The term “CD14 inhibitors” refers to an agent which decreases the ability of CD14 to bind to lipopolysaccharide (LPS). CD14 acts as a co-receptor with Toll-like receptor 4 (TLR4) that binds LPS in the presence of lipopolysaccharide-binding protein (LBP). In some embodiments, the CD14 inhibitor can decrease the binding between CD14 and LPS by blocking the ability of CD14 to interact with LPS.

[0521] In some embodiments, the CD14 inhibitor is an antibody or an antigen-binding fragment thereof. In some embodiments, the CD14 inhibitor is a small molecule. Exemplary CD14 inhibitors are described herein. Additional examples of CD14 inhibitors are known in the art.

[0522] An exemplary sequence for human CD14 is shown below.

Human CD14
(SEQ ID NO: 68)
maaaaasrgv gaklglreir ihlcqrspgs qgvrdfiekr
yvelkkanpd lpilirecsd vqpklwarya fgqetnvpin
nfsadqvtra lenvlsgka

### CD14 Inhibitors—Antibodies

[0523] In some embodiments, the CD14 inhibitor is an antibody or an antigen-binding fragment thereof (e.g., a Fab or a scFv). In some embodiments, the CD14 inhibitor is an antibody or antigen-binding fragment that binds specifically to CD14.

[0524] In some embodiments, the antibody can be a humanized antibody, a chimeric antibody, a multivalent antibody, or a fragment thereof. In some embodiments, an antibody can be a scFv-Fc (Sokolowska-Wedzina et al., Mol. Cancer Res. 15(8):1040-1050, 2017), a VHH domain (Li et al., Immunol. Lett. 188:89-95, 2017), a VNAR domain (Hasler et al., Mol. Immunol. 75:28-37, 2016), a (scFv)₂, a minibody (Kim et al., PLoS One 10(1):e113442, 2014), or a BiTE. In some embodiments, an antibody can be a DVD-Ig (Wu et al., Nat. Biotechnol. 25(11):1290-1297, 2007; WO 08/024188; WO 07/024715), and a dual-affinity re-targeting antibody (DART) (Tsai et al., Mol. Ther. Oncolytics 3:15024, 2016), a triomab (Chelius et al., MAbs 2(3):309-319, 2010), kih IgG with a common LC (Kontermann et al., Drug Discovery Today 20(7):838-847, 2015), a crossmab (Regula et al., EMBO Mol. Med. 9(7):985, 2017), an ortho-Fab IgG (Kontermann et al., Drug Discovery Today 20(7):838-847, 2015), a 2-in-1-IgG (Kontermann et al., Drug Discovery Today 20(7):838-847, 2015), IgG-scFv (Cheal et al., Mol. Cancer Ther. 13(7):1803-1812, 2014), scFv2-Fc (Natsume et al., J. Biochem. 140(3):359-368, 2006), a bi-nanobody (Kontermann et al., Drug Discovery Today 20(7):838-847, 2015), tanden antibody (Kontermann et al., Drug Discovery Today 20(7):838-847, 2015), a DART-Fc (Kontermann et al., Drug Discovery Today 20(7):838-847, 2015), a scFv-HSA-scFv (Kontermann et al., Drug Discovery Today 20(7):838-847, 2015), DNL-Fab3 (Kontermann et al., Drug Discovery Today 20(7):838-847, 2015), DAF (two-in-one or four-in-one), DutaMab, DT-IgG, knobs-in-holes common LC, knobs-in-holes assembly, charge pair antibody, Fab-arm exchange antibody, SEEDbody, Triomab, LUZ-Y, Fcab, kλ-body, orthogonal Fab, DVD-IgG, IgG(H)-scFv, scFv-(H)IgG, IgG(L)-scFv, scFv-(L)-IgG, IgG (L,H)-Fc, IgG(H)-V, V(H)—IgG, IgG(L)-V, V(L)-IgG, KIH IgG-scFab, 2scFv-IgG, IgG-2scFv, scFv4-Ig, Zybody, DVI-IgG, nanobody (e.g., antibodies derived from Camelus bactriamus, Calelus dromaderius, or Lama paccos) (U.S. Pat. No. 5,759,808; Stijlemans et al., J. Biol. Chem. 279:1256-1261, 2004; Dumoulin et al., Nature 424:783-788, 2003; and Pleschberger et al., Bioconjugate Chem. 14:440-448, 2003), nanobody-HSA, a diabody (e.g., Poljak, Structure 2(12):1121-1123, 1994; Hudson et al., J. Immunol. Methods 23(1-2):177-189, 1999), a TandAb (Reusch et al., mAbs 6(3):727-738, 2014), scDiabody (Cuesta et al., Trends in Biotechnol. 28(7):355-362, 2010), scDiabody-CH3 (Sanz et al., Trends in Immunol. 25(2):85-91, 2004), Diabody-CH3 (Guo et al., Triple Body, miniantibody, minibody, TriBi minibody, scFv-CH3 KIH, Fab-scFv, scFv-CH-CL-scFv, F(ab′)2-scFV2, scFv-KIH, Fab-scFv-Fc, tetravalent HCAb, scDiabody-Fc, diabody-Fc, tandem scFv-Fc, intrabody (Huston et al., Human Antibodies 10(3-4):127-142, 2001; Wheeler et al., Mol. Ther. 8(3):355-366, 2003; Stocks, Drug Discov. Today 9(22):960-966, 2004), dock and lock bispecific antibody, ImmTAC, HSAbody, scDiabody-HSA, tandem scFv, IgG-IgG, Cov-X-Body, and scFv1-PEG-scFv2.

[0525] Non-limiting examples of an antigen-binding fragment of an antibody include an Fv fragment, a Fab fragment, a F(ab′)₂ fragment, and a Fab′ fragment. Additional examples of an antigen-binding fragment of an antibody is an antigen-binding fragment of an IgG (e.g., an antigen-binding fragment of IgG1, IgG2, IgG3, or IgG4) (e.g., an antigen-binding fragment of a human or humanized IgG, e.g., human or humanized IgG1, IgG2, IgG3, or IgG4); an antigen-binding fragment of an IgA (e.g., an antigen-binding fragment of IgA1 or IgA2) (e.g., an antigen-binding fragment of a human or humanized IgA, e.g., a human or humanized IgA1 or IgA2); an antigen-binding fragment of an IgD (e.g., an antigen-binding fragment of a human or humanized IgD); an antigen-binding fragment of an IgE (e.g., an antigen-binding fragment of a human or humanized IgE); or an antigen-binding fragment of an IgM (e.g., an antigen-binding fragment of a human or humanized IgM).

[0526] In some embodiments, an antibody can be an IgNAR, a bispecific antibody (Milstein and Cuello, Nature 305:537-539, 1983; Suresh et al., Methods in Enzymology 121:210, 1986; WO 96/27011; Brennan et al., Science 229:81, 1985; Shalaby et al., J. Exp. Med. 175:217-225, 1992; Kolstelny et al., J. Immunol. 148(5):1547-1553, 1992; Hollinger et al., Proc. Natl. Acad. Sci. U.S.A. 90:6444-6448, 1993; Gruber et al., J. Immunol. 152:5368, 1994; Tutt et al., J. Immunol. 147:60, 1991), a bispecific diabody, a triabody (Schoonooghe et al., BMC Biotechnol. 9:70, 2009), a tetrabody, scFv-Fc knobs-into-holes, a scFv-Fc-scFv, a (Fab′scFv)₂, a V-IgG, a IvG-V, a dual V domain IgG, a heavy chain immunoglobulin or a camelid (Holt et al., Trends Biotechnol. 21(11):484-490, 2003), an intrabody, a monoclonal antibody (e.g., a human or humanized monoclonal antibody), a heteroconjugate antibody (e.g., U.S. Pat. No. 4,676,980), a linear antibody (Zapata et al., Protein Eng. 8(10:1057-1062, 1995), a trispecific antibody (Tutt et al., J. Immunol. 147:60, 1991), a Fabs-in-Tandem immunoglobulin (WO 15/103072), or a humanized camelid antibody.

[0527] In some embodiments, the antibody is a humanized antibody, a chimeric antibody, a multivalent antibody, or a fragment thereof. In some embodiments, the antibody is a monoclonal antibody. In some embodiments, the antibody is a humanized monoclonal antibody. See e.g., Hunter & Jones, Nat. Immunol. 16:448-457, 2015; Heo et al., Oncotarget 7(13):15460-15473, 2016. Additional examples of antibodies and antigen-binding fragments thereof are described in U.S. Pat. Nos. 8,440,196; 7,842,144; 8,034,344; and 8,529,895; US 2013/0317203; US 2014/0322239; US 2015/0166666; US 2016/0152714; and US 2017/0002082, each of which is incorporated by reference in its entirety.

[0528] In certain embodiments, the antibody comprises or consists of an antigen-binding fragment or portion of IC14 (Axtelle and Pribble, J. Endotoxin Res. 7(4): 310-314, 2001; Reinhart et al., Crit. Care Med. 32(5): 1100-1108, 2004; Spek et al., J. Clin. Immunol. 23(2): 132-140, 2003). Additional examples of anti-CD14 antibodies and CD14 inhibitors can be found, e.g., in WO 2015/140591 and WO 2014/122660, incorporated in its entirety herein.

[0529] Additional examples of CD14 inhibitors that are antibodies or antibody fragments are described in, e.g., U.S. Patent Application Serial No. 2017/0107294, 2014/0050727, 2012/0227412, 2009/0203052, 2009/0029396, 2008/0286290, 2007/0106067, 2006/0257411, 2006/0073145, 2006/0068445, 2004/0092712, 2004/0091478, and 2002/0150882, each of which is herein incorporated by reference (e.g., the sections that describe CD14 inhibitors).

[0530] In some embodiments, any of the antibodies or antigen-binding fragments described herein has a dissociation constant (K_{D}) of less than 1×10⁻⁵ M (e.g., less than 0.5×10⁻⁵ M, less than 1×10⁻⁶ M, less than 0.5×10⁻⁶ M, less than 1×10⁻⁷ M, less than 0.5×10⁻⁷ M, less than 1×10⁻⁸ M, less than 0.5×10⁻⁸ M, less than 1×10⁻⁹ M, less than 0.5×10⁻⁹ M, less than 1×10⁻¹⁰ M, less than 0.5×10⁻¹⁰ M, less than 1×10⁻¹¹ M, less than 0.5×10⁻¹¹ M, or less than 1×10⁻¹² M), e.g., as measured in phosphate buffered saline using surface plasmon resonance (SPR).

[0531] In some embodiments, any of the antibodies or antigen-binding fragments described herein has a K_{D} of about 1×10⁻¹² M to about 1×10⁻⁵ M, about 0.5×10⁻⁵ M, about 1×10⁻⁶ M, about 0.5×10⁻⁶ M, about 1×10⁻⁷ M, about 0.5×10⁻⁷ M, about 1×10⁻⁸ M, about 0.5×10⁻⁸ M, about 1×10⁻⁹ M, about 0.5×10⁻⁹ M, about 1×10⁻¹⁰ M, about 0.5×10⁻¹⁰ M, about 1×10⁻¹¹ M, or about 0.5×10⁻¹¹ M (inclusive); about 0.5×10⁻¹¹ M to about 1×10⁻⁵ M, about 0.5×10⁻⁵ M, about 1×10⁻⁶ M, about 0.5×10⁻⁶ M, about 1×10⁻⁷ M, about 0.5×10⁻⁷ M, about 1×10⁻⁸ M, about 0.5×10⁻⁸ M, about 1×10⁻⁹ M, about 0.5×10⁻⁹ M, about 1×10⁻¹⁰ M, about 0.5×10⁻¹⁰ M, or about 1×10⁻¹¹ M (inclusive); about 1×10⁻¹¹ M to about 1×10⁻⁵ M, about 0.5×10⁻⁵ M, about 1×10⁻⁶ M, about 0.5×10⁻⁶ M, about 1×10⁻⁷ M, about 0.5×10⁻⁷ M, about 1×10⁻⁸ M, about 0.5×10⁻⁸ M, about 1×10⁻⁹ M, about 0.5×10⁻⁹ M, about 1×10⁻¹⁰ M, or about 0.5×10⁻¹⁰ M (inclusive); about 0.5×10⁻¹⁰ M to about 1×10⁻⁵ M, about 0.5×10⁻⁵ M, about 1×10⁻⁶ M, about 0.5×10⁻⁶ M, about 1×10⁻⁷ M, about 0.5×10⁻⁷ M, about 1×10⁻⁸ M, about 0.5×10⁻⁸ M, about 1×10⁻⁹ M, about 0.5×10⁻⁹ M, or about 1×10⁻¹⁰ M (inclusive); about 1×10⁻¹⁰ M to about 1×10⁻⁵ M, about 0.5×10⁻⁵ M, about 1×10⁻⁶ M, about 0.5×10⁻⁶ M, about 1×10⁻⁷ M, about 0.5×10⁻⁷ M, about 1×10⁻⁸ M, about 0.5×10⁻⁸ M, about 1×10⁻⁹ M, or about 0.5×10⁻⁹ M (inclusive); about 0.5×10⁻⁹ M to about 1×10⁻⁵ M, about 0.5×10⁻⁵ M, about 1×10⁻⁶ M, about 0.5×10⁻⁶ M, about 1×10⁻⁷ M, about 0.5×10⁻⁷ M, about 1×10⁻⁸ M, about 0.5×10⁻⁸ M, or about 1×10⁻⁹ M (inclusive); about 1×10⁻⁹ M to about 1×10⁻⁵ M, about 0.5×10⁻⁵ M, about 1×10⁻⁶ M, about 0.5×10⁻⁶ M, about 1×10⁻⁷ M, about 0.5×10⁻⁷ M, about 1×10⁻⁸ M, or about 0.5×10⁻⁸ M (inclusive); about 0.5×10⁻⁸ M to about 1×10⁻⁵ M, about 0.5×10⁻⁵ M, about 1×10⁻⁶ M, about 0.5×10⁻⁶ M, about 1×10⁻⁷ M, about 0.5×10⁻⁷ M, or about 1×10⁻⁸ M (inclusive); about 1×10⁻⁸ M to about 1×10⁻⁵ M, about 0.5×10⁻⁵ M, about 1×10⁻⁶ M, about 0.5×10⁻⁶ M, about 1×10⁻⁷ M, or about 0.5×10⁻⁷ M (inclusive); about 0.5×10⁻⁷ M to about 1×10⁻⁵ M, about 0.5×10⁻⁵ M, about 1×10⁻⁶ M, about 0.5×10⁻⁶ M, or about 1×10⁻⁷ M (inclusive); about 1×10⁻⁷ M to about 1×10⁻⁵ M, about 0.5×10⁻⁵ M, about 1×10⁻⁶ M, or about 0.5×10⁻⁶ M (inclusive); about 0.5×10⁻⁶ M to about 1×10⁻⁵ M, about 0.5×10⁻⁵ M, or about 1×10⁻⁶ M (inclusive); about 1×10⁻⁶ M to about 1×10⁻⁵ M or about 0.5×10⁻⁵ M (inclusive); or about 0.5×10⁻⁵ M to about 1×10⁻⁵ M (inclusive), e.g., as measured in phosphate buffered saline using surface plasmon resonance (SPR).

[0532] In some embodiments, any of the antibodies or antigen-binding fragments described herein has a K_{off} of about 1×10⁻⁶ s⁻¹ to about 1×10⁻³ s⁻¹, about 0.5×10⁻³ s⁻¹, about 1×10⁻⁴ s⁻¹, about 0.5×10⁻⁴ s⁻¹, about 1×10⁻⁵ s⁻¹, or about 0.5×10⁻⁵ s⁻¹ (inclusive); about 0.5×10⁻⁵ s⁻¹ to about 1×10⁻³ s⁻¹, about 0.5×10⁻³ s⁻¹, about 1×10⁻⁴ s⁻¹, about 0.5×10⁻⁴ s⁻¹, or about 1×10⁻⁵ s⁻¹ (inclusive); about 1×10⁻⁵ s⁻¹ to about 1×10⁻³ s⁻¹, about 0.5×10⁻³ s⁻¹, about 1×10⁻⁴ s⁻¹, or about 0.5×10⁻⁴ s⁻¹ (inclusive); about 0.5×10⁻⁴ s⁻¹ to about 1×10⁻³ s⁻¹, about 0.5×10⁻³ s⁻¹, or about 1×10⁻⁴ s⁻¹ (inclusive); about 1×10⁻⁴ s⁻¹ to about 1×10⁻³ s⁻¹, or about 0.5×10⁻³ s⁻¹ (inclusive); or about 0.5×10⁻⁵ s⁻¹ to about 1×10⁻³ s⁻¹ (inclusive), e.g., as measured in phosphate buffered saline using surface plasmon resonance (SPR).

[0533] In some embodiments, any of the antibodies or antigen-binding fragments described herein has a Kₒₙ of about 1×10² M⁻¹s⁻¹ to about 1×10⁶ M⁻¹s⁻¹, about 0.5×10⁶ M⁻¹s⁻¹, about 1×10⁵ M⁻¹s⁻¹, about 0.5×10⁵ M⁻¹s⁻¹, about 1×10⁴ M⁻¹s⁻¹, about 0.5×10⁴ M⁻¹s⁻¹, about 1×10³ M⁻¹s⁻¹, or about 0.5×10³ M⁻¹s⁻¹ (inclusive); about 0.5×10³ M⁻¹s⁻¹ to about 1×10⁶ M⁻¹s⁻¹, about 0.5×10⁶ M−s¹, about 1×10⁵ M⁻¹s⁻¹, about 0.5×10⁵ M⁻¹s⁻¹, about 1×10⁴ M⁻¹s⁻¹, about 0.5×10⁴ M⁻¹s⁻¹, or about 1×10³ M⁻¹s⁻¹ (inclusive); about 1×10³ M⁻¹s⁻¹ to about 1×10⁶ M⁻¹s⁻¹, about 0.5×10⁶ M⁻¹s⁻¹, about 1×10⁵ M⁻¹s⁻¹, about 0.5×10⁵ M⁻¹s⁻¹, about 1×10⁴ M⁻¹s⁻¹, or about 0.5×10⁴ M⁻¹s⁻¹ (inclusive); about 0.5×10⁴ M⁻¹s⁻¹ to about 1×10⁶ M⁻¹s⁻¹, about 0.5×10⁶ M⁻¹s⁻¹, about 1×10⁵ M⁻¹s⁻¹, about 0.5×10⁵ M⁻¹s⁻¹, or about 1×10⁴ M⁻¹s⁻¹ (inclusive); about 1×10⁴ M⁻¹s⁻¹ to about 1×10⁶ M⁻¹s⁻¹, about 0.5×10⁶ M⁻¹s⁻¹, about 1×10⁵ M⁻¹s⁻¹, or about 0.5×10⁵ M⁻¹s⁻¹ (inclusive); about 0.5×10⁵ M⁻¹s⁻¹ to about 1×10⁶ M⁻¹s⁻¹, about 0.5×10⁶ M⁻¹s⁻¹, or about 1×10⁵ M⁻¹s⁻¹ (inclusive); about 1×10⁵ M⁻¹s⁻¹ to about 1×10⁶ M⁻¹s⁻¹, or about 0.5×10⁶ M⁻¹s⁻¹ (inclusive); or about 0.5×10⁶ M⁻¹s⁻¹ to about 1×10⁶ M⁻¹s⁻¹ (inclusive), e.g., as measured in phosphate buffered saline using surface plasmon resonance (SPR).

[0534] Additional examples of CD14 inhibitors that are antibodies or antigen-binding fragments are known in the art.

### CD14 Inhibitors—Small Molecules

[0535] In some embodiments, the CD14 inhibitor is a small molecule. Non-limiting examples of CD14 inhibitors that are small molecules are described in, e.g., methyl 6-deoxy-6-N-dimethyl-N-cyclopentylammonium-2, 3-di-O-tetradecyl-α-D-glucopyranoside iodide (IAXO-101); methyl 6-Deoxy-6-amino-2,3-di-O-tetradecyl-α-D-glucopyranoside (IAXO-102); N-(3,4-bis-tetradecyloxy-benzyl)-N-cyclopentyl-N,N-dimethylammonium iodide (IAXO-103); and IMO-9200.

[0536] Additional examples of CD14 inhibitors that are small molecules are known in the art.

### CD20 Inhibitors

[0537] The term “CD20 inhibitors” refers to an agent that binds specifically to CD20 expressed on the surface of a mammalian cell.

[0538] In some embodiments, the CD20 inhibitor is an antibody or an antigen-binding fragment thereof, or a fusion protein or peptide. Exemplary CD20 inhibitors are described herein. Additional examples of CD20 inhibitors are known in the art.

[0539] An exemplary sequence of human CD20 is shown below.

Human CD20
(SEQ ID NO: 69)
mttprnsvng tfpaepmkgp iamqsgpkpl frrmsslvgp
tqsffmresk tlgavqimng lfhialggll mipagiyapi
cvtvwyplwg gimyiisgsl laateknsrk clvkgkmimn
slslfaaisg milsimdiln ikishflkme slnfirahtp
yiniyncepa npseknspst qycysiqslf lgilsvmlif
affqelviag ivenewkrtc srpksnivil saeekkeqti
eikeevvglt etssqpknee dieiipiqee eeeetetnfp
eppqdqessp iendssp

### CD20 Inhibitors—Antibodies

[0540] In some embodiments, the CD20 inhibitor is an antibody or an antigen-binding fragment thereof (e.g., a Fab or a scFv).

[0541] In some embodiments, the antibody can be a humanized antibody, a chimeric antibody, a multivalent antibody, or a fragment thereof. In some embodiments, an antibody can be a scFv-Fc (Sokolowska-Wedzina et al., Mol. Cancer Res. 15(8):1040-1050, 2017), a VHH domain (Li et al., Immunol. Lett. 188:89-95, 2017), a VNAR domain (Hasler et al., Mol. Immunol. 75:28-37, 2016), a (scFv)₂, a minibody (Kim et al., PLoS One 10(1):e113442, 2014), or a BiTE. In some embodiments, an antibody can be a DVD-Ig (Wu et al., Nat. Biotechnol. 25(11):1290-1297, 2007; WO 08/024188; WO 07/024715), and a dual-affinity re-targeting antibody (DART) (Tsai et al., Mol. Ther. Oncolytics 3:15024, 2016), a triomab (Chelius et al., MAbs 2(3):309-319, 2010), kih IgG with a common LC (Kontermann et al., Drug Discovery Today 20(7):838-847, 2015), a crossmab (Regula et al., EMBO Mol. Med. 9(7):985, 2017), an ortho-Fab IgG (Kontermann et al., Drug Discovery Today 20(7):838-847, 2015), a 2-in-1-IgG (Kontermann et al., Drug Discovery Today 20(7):838-847, 2015), IgG-scFv (Cheal et al., Mol. Cancer Ther. 13(7):1803-1812, 2014), scFv2-Fc (Natsume et al., J. Biochem. 140(3):359-368, 2006), a bi-nanobody (Kontermann et al., Drug Discovery Today 20(7):838-847, 2015), tanden antibody (Kontermann et al., Drug Discovery Today 20(7):838-847, 2015), a DART-Fc (Kontermann et al., Drug Discovery Today 20(7):838-847, 2015), a scFv-HSA-scFv (Kontermann et al., Drug Discovery Today 20(7):838-847, 2015), DNL-Fab3 (Kontermann et al., Drug Discovery Today 20(7):838-847, 2015), DAF (two-in-one or four-in-one), DutaMab, DT-IgG, knobs-in-holes common LC, knobs-in-holes assembly, charge pair antibody, Fab-arm exchange antibody, SEEDbody, Triomab, LUZ-Y, Fcab, kλ-body, orthogonal Fab, DVD-IgG, IgG(H)-scFv, scFv-(H)IgG, IgG(L)-scFv, scFv-(L)-IgG, IgG (L,H)-Fc, IgG(H)-V, V(H)—IgG, IgG(L)-V, V(L)-IgG, KIH IgG-scFab, 2scFv-IgG, IgG-2scFv, scFv4-Ig, Zybody, DVI-IgG, nanobody (e.g., antibodies derived from Camelus bactriamus, Calelus dromaderius, or Lama paccos) (U.S. Pat. No. 5,759,808; Stijlemans et al., J. Biol. Chem. 279:1256-1261, 2004; Dumoulin et al., Nature 424:783-788, 2003; and Pleschberger et al., Bioconjugate Chem. 14:440-448, 2003), nanobody-HSA, a diabody (e.g., Poljak, Structure 2(12):1121-1123, 1994; Hudson et al., J. Immunol. Methods 23(1-2):177-189, 1999), a TandAb (Reusch et al., mAbs 6(3):727-738, 2014), scDiabody (Cuesta et al., Trends in Biotechnol. 28(7):355-362, 2010), scDiabody-CH3 (Sanz et al., Trends in Immunol. 25(2):85-91, 2004), Diabody-CH3 (Guo et al., Triple Body, miniantibody, minibody, TriBi minibody, scFv-CH3 KIH, Fab-scFv, scFv-CH-CL-scFv, F(ab′)2-scFV2, scFv-KIH, Fab-scFv-Fc, tetravalent HCAb, scDiabody-Fc, diabody-Fc, tandem scFv-Fc, intrabody (Huston et al., Human Antibodies 10(3-4):127-142, 2001; Wheeler et al., Mol. Ther. 8(3):355-366, 2003; Stocks, Drug Discov. Today 9(22):960-966, 2004), dock and lock bispecific antibody, ImmTAC, HSAbody, scDiabody-HSA, tandem scFv, IgG-IgG, Cov-X-Body, and scFv1-PEG-scFv2.

[0542] Non-limiting examples of an antigen-binding fragment of an antibody include an Fv fragment, a Fab fragment, a F(ab′)₂ fragment, and a Fab′ fragment. Additional examples of an antigen-binding fragment of an antibody is an antigen-binding fragment of an IgG (e.g., an antigen-binding fragment of IgG1, IgG2, IgG3, or IgG4) (e.g., an antigen-binding fragment of a human or humanized IgG, e.g., human or humanized IgG1, IgG2, IgG3, or IgG4); an antigen-binding fragment of an IgA (e.g., an antigen-binding fragment of IgA1 or IgA2) (e.g., an antigen-binding fragment of a human or humanized IgA, e.g., a human or humanized IgA1 or IgA2); an antigen-binding fragment of an IgD (e.g., an antigen-binding fragment of a human or humanized IgD); an antigen-binding fragment of an IgE (e.g., an antigen-binding fragment of a human or humanized IgE); or an antigen-binding fragment of an IgM (e.g., an antigen-binding fragment of a human or humanized IgM).

[0543] In some embodiments, an antibody can be an IgNAR, a bispecific antibody (Milstein and Cuello, Nature 305:537-539, 1983; Suresh et al., Methods in Enzymology 121:210, 1986; WO 96/27011; Brennan et al., Science 229:81, 1985; Shalaby et al., J. Exp. Med. 175:217-225, 1992; Kolstelny et al., J. Immunol. 148(5):1547-1553, 1992; Hollinger et al., Proc. Natl. Acad. Sci. U.S.A. 90:6444-6448, 1993; Gruber et al., J. Immunol. 152:5368, 1994; Tutt et al., J. Immunol. 147:60, 1991), a bispecific diabody, a triabody (Schoonooghe et al., BMC Biotechnol. 9:70, 2009), a tetrabody, scFv-Fc knobs-into-holes, a scFv-Fc-scFv, a (Fab′scFv)₂, a V-IgG, a IvG-V, a dual V domain IgG, a heavy chain immunoglobulin or a camelid (Holt et al., Trends Biotechnol. 21(11):484-490, 2003), an intrabody, a monoclonal antibody (e.g., a human or humanized monoclonal antibody), a heteroconjugate antibody (e.g., U.S. Pat. No. 4,676,980), a linear antibody (Zapata et al., Protein Eng. 8(10:1057-1062, 1995), a trispecific antibody (Tutt et al., J. Immunol. 147:60, 1991), a Fabs-in-Tandem immunoglobulin (WO 15/103072), or a humanized camelid antibody.

[0544] In some embodiments, the antibody is a humanized antibody, a chimeric antibody, a multivalent antibody, or a fragment thereof. In some embodiments, the antibody is a monoclonal antibody. In some embodiments, the antibody is a humanized monoclonal antibody. See e.g., Hunter & Jones, Nat. Immunol. 16:448-457, 2015; Heo et al., Oncotarget 7(13):15460-15473, 2016. Additional examples of antibodies and antigen-binding fragments thereof are described in U.S. Pat. Nos. 8,440,196; 7,842,144; 8,034,344; and 8,529,895; US 2013/0317203; US 2014/0322239; US 2015/0166666; US 2016/0152714; and US 2017/0002082, each of which is incorporated by reference in its entirety.

[0545] In certain embodiments, the antibody comprises or consists of an antigen-binding fragment or portion of rituximab (Rituxan®, MabThera®, MK-8808) (Ji et al., Indian J. Hematol. Blood Transfus. 33(4): 525-533, 2017; and Calderon-Gomez and Panes Gastroenterology 142(1): 1741-76, 2012); -PF-05280586; ocrelizumab (Ocrevus™) (Sharp N. Engl. J. Med. 376(17): 1692, 2017); of atumumab (Arzerra®; HuMax-CD20) (ADallal Ther. Clin. Risk Manag. 13:905-907, 2017; and Furman et al., Lancet Haematol. 4(1): e24-e34, 2017); PF-05280586 (Williams et al., Br. J Clin. Pharmacol. 82(6): 1568-1579, 2016; and Cohen et al., Br. J. Clin. Pharmacol. 82(1): 129-138, 2016); obinutuzumab (Gazyva®) (Reddy et al., Rheumatology 56(7): 1227-1237, 2017; and Marcus et al., N. Engl. J. Med. 377(14): 1331-1344, 2017); ocaratuzumab (AME-133v; LY2469298) (Cheney et al., Mabs 6(3): 749-755, 2014; and Tobinai et al., Cancer Sci. 102(2): 432-8, 2011); GP2013 (Jurczak et al., Lancet Haenatol. 4(8): e350-e361, 2017); IBI301; HLX01; veltuzumab (hA20) (Kalaycio et al., Leuk. Lymphoma 57(4): 803-811, 2016; and Ellebrecht et al., JAMA Dermatol. 150(12): 1331-1335, 2014); SCT400 (Gui et al., Chin. J. Cancer Res. 28(2): 197-208); ibritumomab tiuxetan (Zevalin®) (Philippe et al., Bone Marrow Transplant 51(8): 1140-1142, 2016; and Lossos et al., Leuk. Lymphoma 56(6): 1750-1755, 2015); ublituximab (TG1101) (Sharman et al., Blood 124: 4679, 2014; and Sawas et al., Br. J. Haematol. 177(2): 243-253, 2017); LFB-R603 (Esteves et al., Blood 118: 1660, 2011; and Baritaki et al., Int. J. Oncol. 38(6): 1683-1694, 2011); or tositumomab (Bexxar) (Buchegger et al., J. Nucl. Med. 52(6): 896-900, 2011; and William and Bierman Expert Opin. Biol. Ther. 10(8): 1271-1278, 2010). Additional examples of CD20 antibodies are known in the art (see, e.g., WO 2008/156713).

[0546] In certain embodiments, the antibody comprises or consists of an antigen-binding fragment or portion of a bispecific antibody (e.g., XmAb13676; REGN1979 (Bannerji et al., Blood 128: 621, 2016; and Smith et al., Sci. Rep. 5: 17943, 2015); PRO131921 (Casulo et al., Clin. Immnol. 154(1): 37-46, 2014; and Robak and Robak BioDrugs 25(1): 13-25, 2011); or Acellbia).

[0547] In some embodiments, the CD20 inhibitor comprises or consists of a trispecific antibody (e.g., FBTA05 (Bi20; Lymphomun) (Buhmann et al., J. Transl. Med. 11:160, 2013; and Schuster et al., Br. J Haematol. 169(1): 90-102, 2015)).

[0548] Additional examples of CD20 inhibitors that are antibodies or antigen-binding fragments are described in, e.g., U.S. Patent Application Publication Nos. 2017/0304441, 2017/0128587, 2017/0088625, 2017/0037139, 2017/0002084, 2016/0362472, 2016/0347852, 2016/0333106, 2016/0271249, 2016/0243226, 2016/0115238, 2016/0108126, 2016/0017050, 2016/0017047, 2016/0000912, 2016/0000911, 2015/0344585, 2015/0290317, 2015/0274834, 2015/0265703, 2015/0259428, 2015/0218280, 2015/0125446, 2015/0093376, 2015/0079073, 2015/0071911, 2015/0056186, 2015/0010540, 2014/0363424, 2014/0356352, 2014/0328843, 2014/0322200, 2014/0294807, 2014/0248262, 2014/0234298, 2014/0093454, 2014/0065134, 2014/0044705, 2014/0004104, 2014/0004037, 2013/0280243, 2013/0273041, 2013/0251706, 2013/0195846, 2013/0183290, 2013/0089540, 2013/0004480, 2012/0315268, 2012/0301459, 2012/0276085, 2012/0263713, 2012/0258102, 2012/0258101, 2012/0251534, 2012/0219549, 2012/0183545, 2012/0100133, 2012/0034185, 2011/0287006, 2011/0263825, 2011/0243931, 2011/0217298, 2011/0200598, 2011/0195022, 2011/0195021, 2011/0177067, 2011/0165159, 2011/0165152, 2011/0165151, 2011/0129412, 2011/0086025, 2011/0081681, 2011/0020322, 2010/0330089, 2010/0310581, 2010/0303808, 2010/0183601, 2010/0080769, 2009/0285795, 2009/0203886, 2009/0197330, 2009/0196879, 2009/0191195, 2009/0175854, 2009/0155253, 2009/0136516, 2009/0130089, 2009/0110688, 2009/0098118, 2009/0074760, 2009/0060913, 2009/0035322, 2008/0260641, 2008/0213273, 2008/0089885, 2008/0044421, 2008/0038261, 2007/0280882, 2007/0231324, 2007/0224189, 2007/0059306, 2007/0020259, 2007/0014785, 2007/0014720, 2006/0121032, 2005/0180972, 2005/0112060, 2005/0069545, 2005/0025764, 2004/0213784, 2004/0167319, 2004/0093621, 2003/0219433, 2003/0206903, 2003/0180292, 2003/0026804, 2002/0039557, 2002/0012665, and 2001/0018041, each herein incorporated by reference in their entirety (e.g., sections describing CD20 inhibitors).

[0549] In some embodiments, any of the antibodies or antigen-binding fragments described herein has a dissociation constant (K_{D}) of less than 1×10⁻⁵ M (e.g., less than 0.5×10⁻⁵ M, less than 1×10⁻⁶ M, less than 0.5×10⁻⁶ M, less than 1×10⁻⁷ M, less than 0.5×10⁻⁷ M, less than 1×10⁻⁸ M, less than 0.5×10⁻⁸ M, less than 1×10⁻⁹ M, less than 0.5×10⁻⁹ M, less than 1×10⁻¹⁰ M, less than 0.5×10⁻¹⁰ M, less than 1×10⁻¹¹ M, less than 0.5×10⁻¹¹ M, or less than 1×10⁻¹² M), e.g., as measured in phosphate buffered saline using surface plasmon resonance (SPR).

[0550] In some embodiments, any of the antibodies or antigen-binding fragments described herein has a K_{D} of about 1×10⁻¹² M to about 1×10⁻⁵ M, about 0.5×10⁻⁵ M, about 1×10⁻⁶ M, about 0.5×10⁻⁶ M, about 1×10⁻⁷ M, about 0.5×10⁻⁷ M, about 1×10⁻⁸ M, about 0.5×10⁻⁸ M, about 1×10⁻⁹ M, about 0.5×10⁻⁹ M, about 1×10⁻¹⁰ M, about 0.5×10⁻¹⁰ M, about 1×10⁻¹¹ M, or about 0.5×10⁻¹¹ M (inclusive); about 0.5×10⁻¹¹ M to about 1×10⁻⁵ M, about 0.5×10⁻⁵ M, about 1×10⁻⁶ M, about 0.5×10⁻⁶ M, about 1×10⁻⁷ M, about 0.5×10⁻⁷ M, about 1×10⁻⁸ M, about 0.5×10⁻⁸ M, about 1×10⁻⁹ M, about 0.5×10⁻⁹ M, about 1×10⁻¹⁰ M, about 0.5×10⁻¹⁰ M, or about 1×10⁻¹¹ M (inclusive); about 1×10⁻¹¹ M to about 1×10⁻⁵ M, about 0.5×10⁻⁵ M, about 1×10⁻⁶ M, about 0.5×10⁻⁶ M, about 1×10⁻⁷ M, about 0.5×10⁻⁷ M, about 1×10⁻⁸ M, about 0.5×10⁻⁸ M, about 1×10⁻⁹ M, about 0.5×10⁻⁹ M, about 1×10⁻¹⁰ M, or about 0.5×10⁻¹⁰ M (inclusive); about 0.5×10⁻¹⁰ M to about 1×10⁻⁵ M, about 0.5×10⁻⁵ M, about 1×10⁻⁶ M, about 0.5×10⁻⁶ M, about 1×10⁻⁷ M, about 0.5×10⁻⁷ M, about 1×10⁻⁸ M, about 0.5×10⁻⁸ M, about 1×10⁻⁹ M, about 0.5×10⁻⁹ M, or about 1×10⁻¹⁰ M (inclusive); about 1×10⁻¹⁰ M to about 1×10⁻⁵ M, about 0.5×10⁻⁵ M, about 1×10⁻⁶ M, about 0.5×10⁻⁶ M, about 1×10⁻⁷ M, about 0.5×10⁻⁷ M, about 1×10⁻⁸ M, about 0.5×10⁻⁸ M, about 1×10⁻⁹ M, or about 0.5×10⁻⁹ M (inclusive); about 0.5×10⁻⁹ M to about 1×10⁻⁵ M, about 0.5×10⁻⁵ M, about 1×10⁻⁶ M, about 0.5×10⁻⁶ M, about 1×10⁻⁷ M, about 0.5×10⁻⁷ M, about 1×10⁻⁸ M, about 0.5×10⁻⁸ M, or about 1×10⁻⁹ M (inclusive); about 1×10⁻⁹ M to about 1×10⁻⁵ M, about 0.5×10⁻⁵ M, about 1×10⁻⁶ M, about 0.5×10⁻⁶ M, about 1×10⁻⁷ M, about 0.5×10⁻⁷ M, about 1×10⁻⁸ M, or about 0.5×10⁻⁸ M (inclusive); about 0.5×10⁻⁸ M to about 1×10⁻⁵ M, about 0.5×10⁻⁵ M, about 1×10⁻⁶ M, about 0.5×10⁻⁶ M, about 1×10⁻⁷ M, about 0.5×10⁻⁷ M, or about 1×10⁻⁸ M (inclusive); about 1×10⁻⁸ M to about 1×10⁻⁵ M, about 0.5×10⁻⁵ M, about 1×10⁻⁶ M, about 0.5×10⁻⁶ M, about 1×10⁻⁷ M, or about 0.5×10⁻⁷ M (inclusive); about 0.5×10⁻⁷ M to about 1×10⁻⁵ M, about 0.5×10⁻⁵ M, about 1×10⁻⁶ M, about 0.5×10⁻⁶ M, or about 1×10⁻⁷ M (inclusive); about 1×10⁻⁷ M to about 1×10⁻⁵ M, about 0.5×10⁻⁵ M, about 1×10⁻⁶ M, or about 0.5×10⁻⁶ M (inclusive); about 0.5×10⁻⁶ M to about 1×10⁻⁵ M, about 0.5×10⁻⁵ M, or about 1×10⁻⁶ M (inclusive); about 1×10⁻⁶ M to about 1×10⁻⁵ M or about 0.5×10⁻⁵ M (inclusive); or about 0.5×10⁻⁵ M to about 1×10⁻⁵ M (inclusive), e.g., as measured in phosphate buffered saline using surface plasmon resonance (SPR).

[0551] In some embodiments, any of the antibodies or antigen-binding fragments described herein has a K_{off} of about 1×10⁻⁶ s⁻¹ to about 1×10⁻³ s⁻¹, about 0.5×10⁻³ s⁻¹, about 1×10⁻⁴ s⁻¹, about 0.5×10⁻⁴ s⁻¹, about 1×10⁻⁵ s⁻¹, or about 0.5×10⁻⁵ s⁻¹ (inclusive); about 0.5×10⁻⁵ s⁻¹ to about 1×10⁻³ s⁻¹, about 0.5×10⁻³ s⁻¹, about 1×10⁻⁴ s⁻¹, about 0.5×10⁻⁴ s⁻¹, or about 1×10⁻⁵ s⁻¹ (inclusive); about 1×10⁻⁵ s⁻¹ to about 1×10⁻³ s⁻¹, about 0.5×10⁻³ s⁻¹, about 1×10⁻⁴ s⁻¹, or about 0.5×10⁻⁴ s⁻¹ (inclusive); about 0.5×10⁻⁴ s⁻¹ to about 1×10⁻³ s⁻¹, about 0.5×10⁻³ s⁻¹, or about 1×10⁻⁴ s⁻¹ (inclusive); about 1×10⁻⁴ s⁻¹ to about 1×10⁻³ s⁻¹, or about 0.5×10⁻³ s⁻¹ (inclusive); or about 0.5×10⁻⁵ s⁻¹ to about 1×10⁻³ s⁻¹ (inclusive), e.g., as measured in phosphate buffered saline using surface plasmon resonance (SPR).

[0552] In some embodiments, any of the antibodies or antigen-binding fragments described herein has a Kₒₙ of about 1×10² M⁻¹s⁻¹ to about 1×10⁶ M⁻¹s⁻¹, about 0.5×10⁶ M⁻¹s⁻¹, about 1×10⁵ M⁻¹s⁻¹, about 0.5×10⁵ M⁻¹s⁻¹, about 1×10⁴ M⁻¹s⁻¹, about 0.5×10⁴ M⁻¹s⁻¹, about 1×10³ M⁻¹s⁻¹, or about 0.5×10³ M⁻¹s⁻¹ (inclusive); about 0.5×10³ M⁻¹s⁻¹ to about 1×10⁶ M⁻¹s⁻¹, about 0.5×10⁶ M⁻¹s⁻¹, about 1×10⁵ M⁻¹s⁻¹, about 0.5×10⁵ M⁻¹s⁻¹, about 1×10⁴ M⁻¹s⁻¹, about 0.5×10⁴ M⁻¹s⁻¹, or about 1×10³ M⁻¹s⁻¹ (inclusive); about 1×10³ M⁻¹s⁻¹ to about 1×10⁶ M⁻¹s⁻¹, about 0.5×10⁶ M⁻¹s⁻¹, about 1×10⁵ M⁻¹s⁻¹, about 0.5×10⁵ M⁻¹s⁻¹, about 1×10⁴ M⁻¹s⁻¹, or about 0.5×10⁴ M⁻¹s⁻¹ (inclusive); about 0.5×10⁴ M⁻¹s⁻¹ to about 1×10⁶ M⁻¹s⁻¹, about 0.5×10⁶ M⁻¹s⁻¹, about 1×10⁵ M⁻¹s⁻¹, about 0.5×10⁵ M⁻¹s⁻¹, or about 1×10⁴ M⁻¹s⁻¹ (inclusive); about 1×10⁴ M⁻¹s⁻¹ to about 1×10⁶ M⁻¹s⁻¹, about 0.5×10⁶ M⁻¹s⁻¹, about 1×10⁵ M⁻¹s⁻¹, or about 0.5×10⁵ M⁻¹s⁻¹ (inclusive); about 0.5×10⁵ M⁻¹s⁻¹ to about 1×10⁶ M⁻¹s⁻¹, about 0.5×10⁶ M⁻¹s⁻¹, or about 1×10⁵ M⁻¹s⁻¹ (inclusive); about 1×10⁵ M⁻¹s⁻¹ to about 1×10⁶ M⁻¹s⁻¹, or about 0.5×10⁶ M⁻¹s⁻¹ (inclusive); or about 0.5×10⁶ M⁻¹s⁻¹ to about 1×10⁶ M⁻¹s⁻¹ (inclusive), e.g., as measured in phosphate buffered saline using surface plasmon resonance (SPR). Additional examples of CD20 inhibitors that are antibodies or antigen-binding fragments are known in the art.

### CD20 Inhibitors—Peptides and Fusion Proteins

[0553] In some embodiments, the CD20 inhibitor is an immunotoxin (e.g., MT-3724 (Hamlin Blood 128: 4200, 2016).

[0554] In some embodiments, the CD20 inhibitor is a fusion protein (e.g., TRU-015 (Rubbert-Roth Curr. Opin. Mol. Ther 12(1): 115-123, 2010). Additional examples of CD20 inhibitors that are fusion proteins are described in, e.g., U.S. Patent Application Publication Nos. 2012/0195895, 2012/0034185, 2009/0155253, 2007/0020259, and 2003/0219433, each of which are herein incorporated by reference in their entirety (e.g., sections describing CD20 inhibitors).

### CD25 Inhibitors

[0555] The term “CD25 inhibitors” refers to an agent which decreases the ability of CD25 (also called interleukin-2 receptor alpha chain) to bind to interleukin-2. CD25 forms a complex with interleukin-2 receptor beta chain and interleukin-2 common gamma chain.

[0556] In some embodiments, the CD25 inhibitor is an antibody or an antigen-binding fragment thereof, or a fusion protein. Exemplary CD25 inhibitors are described herein. Additional examples of CD25 inhibitors are known in the art.

[0557] An exemplary sequence of human CD25 is shown below.

Human CD25 Isoform 1
(SEQ ID NO: 70)
elcdddppe iphatfkama ykegtmlnce ckrgfrriks
gslymlctgn sshsswdnqc qctssatmt tkqvtpqpee
qkerkttemq spmqpvdqas lpghcreppp weneateriy
hfvvgqmvyy qcvqgyralh rgpaesvckm thgktrwtqp
qlictgemet sqfpgeekpq aspegrpese tsclvtadf
qiqtemaatm etsiftteyq vavagcvfll isylllsglt
wqrrqrksrr ti
Human CD25 Isoform 2
(SEQ ID NO: 71)
elcdddppe iphatfkama ykegtmlnce ckrgfrriks
gslymlctgn sshsswdnqc qctssatmt tkqvtpqpee
qkerkttemq spmqpvdqas lpgeekpqas pegrpesets
clvtadfqi qtemaatmet siftteyqva vagcvfllis
vlllsgltwq rrqrksrrti
Human CD25 Isoform 3
(SEQ ID NO: 72)
elcdddppe iphatfkama ykegtmlnce ckrgfrriks
gslymlctgn sshsswdnqc qctssatmt tkqvtpqpee
qkerkttemq spmqpvdqas lpdfqiqtem aatmetsift
teyqvavagc vfflisvlll sgltwqrrqr ksrrti

### CD25 Inhibitors—Antibodies

[0558] In some embodiments, the CD25 inhibitor is an antibody or an antigen-binding fragment thereof (e.g., a Fab or a scFv). In some embodiments, a CD25 inhibitor is an antibody or an antigen-binding fragment thereof that specifically binds to CD25. In some embodiments, a CD25 inhibitor is an antibody that specifically binds to IL-2.

[0559] In some embodiments, the antibody can be a humanized antibody, a chimeric antibody, a multivalent antibody, or a fragment thereof. In some embodiments, an antibody can be a scFv-Fc (Sokolowska-Wedzina et al., Mol. Cancer Res. 15(8):1040-1050, 2017), a VHH domain (Li et al., Immunol. Lett. 188:89-95, 2017), a VNAR domain (Hasler et al., Mol. Immunol. 75:28-37, 2016), a (scFv)₂, a minibody (Kim et al., PLoS One 10(1):e113442, 2014), or a BiTE. In some embodiments, an antibody can be a DVD-Ig (Wu et al., Nat. Biotechnol. 25(11):1290-1297, 2007; WO 08/024188; WO 07/024715), and a dual-affinity re-targeting antibody (DART) (Tsai et al., Mol. Ther. Oncolytics 3:15024, 2016), a triomab (Chelius et al., MAbs 2(3):309-319, 2010), kih IgG with a common LC (Kontermann et al., Drug Discovery Today 20(7):838-847, 2015), a crossmab (Regula et al., EMBO Mol. Med. 9(7):985, 2017), an ortho-Fab IgG (Kontermann et al., Drug Discovery Today 20(7):838-847, 2015), a 2-in-1-IgG (Kontermann et al., Drug Discovery Today 20(7):838-847, 2015), IgG-scFv (Cheal et al., Mol. Cancer Ther. 13(7):1803-1812, 2014), scFv2-Fc (Natsume et al., J. Biochem. 140(3):359-368, 2006), a bi-nanobody (Kontermann et al., Drug Discovery Today 20(7):838-847, 2015), tanden antibody (Kontermann et al., Drug Discovery Today 20(7):838-847, 2015), a DART-Fc (Kontermann et al., Drug Discovery Today 20(7):838-847, 2015), a scFv-HSA-scFv (Kontermann et al., Drug Discovery Today 20(7):838-847, 2015), DNL-Fab3 (Kontermann et al., Drug Discovery Today 20(7):838-847, 2015), DAF (two-in-one or four-in-one), DutaMab, DT-IgG, knobs-in-holes common LC, knobs-in-holes assembly, charge pair antibody, Fab-arm exchange antibody, SEEDbody, Triomab, LUZ-Y, Fcab, kλ-body, orthogonal Fab, DVD-IgG, IgG(H)-scFv, scFv-(H)IgG, IgG(L)-scFv, scFv-(L)-IgG, IgG (L,H)-Fc, IgG(H)-V, V(H)—IgG, IgG(L)-V, V(L)-IgG, KIH IgG-scFab, 2scFv-IgG, IgG-2scFv, scFv4-Ig, Zybody, DVI-IgG, nanobody (e.g., antibodies derived from Camelus bactriamus, Calelus dromaderius, or Lama paccos) (U.S. Pat. No. 5,759,808; Stijlemans et al., J. Biol. Chem. 279:1256-1261, 2004; Dumoulin et al., Nature 424:783-788, 2003; and Pleschberger et al., Bioconjugate Chem. 14:440-448, 2003), nanobody-HSA, a diabody (e.g., Poljak, Structure 2(12):1121-1123, 1994; Hudson et al., J. Immunol. Methods 23(1-2):177-189, 1999), a TandAb (Reusch et al., mAbs 6(3):727-738, 2014), scDiabody (Cuesta et al., Trends in Biotechnol. 28(7):355-362, 2010), scDiabody-CH3 (Sanz et al., Trends in Immunol. 25(2):85-91, 2004), Diabody-CH3 (Guo et al., Triple Body, miniantibody, minibody, TriBi minibody, scFv-CH3 KIH, Fab-scFv, scFv-CH-CL-scFv, F(ab′)2-scFV2, scFv-KIH, Fab-scFv-Fc, tetravalent HCAb, scDiabody-Fc, diabody-Fc, tandem scFv-Fc, intrabody (Huston et al., Human Antibodies 10(3-4):127-142, 2001; Wheeler et al., Mol. Ther. 8(3):355-366, 2003; Stocks, Drug Discov. Today 9(22):960-966, 2004), dock and lock bispecific antibody, ImmTAC, HSAbody, scDiabody-HSA, tandem scFv, IgG-IgG, Cov-X-Body, and scFv1-PEG-scFv2.

[0560] Non-limiting examples of an antigen-binding fragment of an antibody include an Fv fragment, a Fab fragment, a F(ab′)₂ fragment, and a Fab′ fragment. Additional examples of an antigen-binding fragment of an antibody is an antigen-binding fragment of an IgG (e.g., an antigen-binding fragment of IgG1, IgG2, IgG3, or IgG4) (e.g., an antigen-binding fragment of a human or humanized IgG, e.g., human or humanized IgG1, IgG2, IgG3, or IgG4); an antigen-binding fragment of an IgA (e.g., an antigen-binding fragment of IgA1 or IgA2) (e.g., an antigen-binding fragment of a human or humanized IgA, e.g., a human or humanized IgA1 or IgA2); an antigen-binding fragment of an IgD (e.g., an antigen-binding fragment of a human or humanized IgD); an antigen-binding fragment of an IgE (e.g., an antigen-binding fragment of a human or humanized IgE); or an antigen-binding fragment of an IgM (e.g., an antigen-binding fragment of a human or humanized IgM).

[0561] In some embodiments, an antibody can be an IgNAR, a bispecific antibody (Milstein and Cuello, Nature 305:537-539, 1983; Suresh et al., Methods in Enzymology 121:210, 1986; WO 96/27011; Brennan et al., Science 229:81, 1985; Shalaby et al., J. Exp. Med. 175:217-225, 1992; Kolstelny et al., J. Immunol. 148(5):1547-1553, 1992; Hollinger et al., Proc. Nat. Acad. Sci. U.S.A. 90:6444-6448, 1993; Gruber et al., J. Immunol. 152:5368, 1994; Tutt et al., J. Immunol. 147:60, 1991), a bispecific diabody, a triabody (Schoonooghe et al., BMC Biotechnol. 9:70, 2009), a tetrabody, scFv-Fc knobs-into-holes, a scFv-Fc-scFv, a (Fab′scFv)₂, a V-IgG, a IvG-V, a dual V domain IgG, a heavy chain immunoglobulin or a camelid (Holt et al., Trends Biotechnol. 21(11):484-490, 2003), an intrabody, a monoclonal antibody (e.g., a human or humanized monoclonal antibody), a heteroconjugate antibody (e.g., U.S. Pat. No. 4,676,980), a linear antibody (Zapata et al., Protein Eng. 8(10:1057-1062, 1995), a trispecific antibody (Tutt et al., J. Immunol. 147:60, 1991), a Fabs-in-Tandem immunoglobulin (WO 15/103072), or a humanized camelid antibody.

[0562] In some embodiments, the antibody is a humanized antibody, a chimeric antibody, a multivalent antibody, or a fragment thereof. In some embodiments, the antibody is a monoclonal antibody. In some embodiments, the antibody is a humanized monoclonal antibody. See e.g., Hunter & Jones, Nat. Immunol. 16:448-457, 2015; Heo et al., Oncotarget 7(13):15460-15473, 2016. Additional examples of antibodies and antigen-binding fragments thereof are described in U.S. Pat. Nos. 8,440,196; 7,842,144; 8,034,344; and 8,529,895; US 2013/0317203; US 2014/0322239; US 2015/0166666; US 2016/0152714; and US 2017/0002082, each of which is incorporated by reference in its entirety.

[0563] In certain embodiments, the antibody comprises or consists of an antigen-binding fragment or portion of basiliximab (Simulect™) (Wang et al., Clin. Exp. Immunol. 155(3): 496-503, 2009; and Kircher et al., Clin. Exp. Immunol. 134(3): 426-430, 2003); daclizumab (Zenapax; Zinbryta®) (Berkowitz et al., Clin. Immunol. 155(2): 176-187, 2014; and Bielekova et al., Arch Neurol. 66(4): 483-489, 2009); or IMTOX-25.

[0564] In some embodiments, the CD25 inhibitor is an antibody-drug-conjugate (e.g., ADCT-301 (Flynn et al., Blood 124: 4491, 2014)).

[0565] Additional examples of CD25 inhibitors that are antibodies are known in the art (see, e.g., WO 2004/045512). Additional examples of CD25 inhibitors that are antibodies or antigen-binding fragments are described in, e.g., U.S. Patent Application Publication Nos. 2017/0240640, 2017/0233481, 2015/0259424, 2015/0010539, 2015/0010538, 2012/0244069, 2009/0081219, 2009/0041775, 2008/0286281, 2008/0171017, 2004/0170626, 2001/0041179, and 2010/0055098, each of which is incorporated herein by reference (e.g., sections that describe CD25 inhibitors).

[0566] In some embodiments, any of the antibodies or antigen-binding fragments described herein has a dissociation constant (K_{D}) of less than 1×10⁻⁵ M (e.g., less than 0.5×10⁻⁵ M, less than 1×10⁻⁶ M, less than 0.5×10⁻⁶ M, less than 1×10⁻⁷ M, less than 0.5×10⁻⁷ M, less than 1×10⁻⁸ M, less than 0.5×10⁻⁸ M, less than 1×10⁻⁹ M, less than 0.5×10⁻⁹ M, less than 1×10⁻¹⁰ M, less than 0.5×10⁻¹⁰ M, less than 1×10⁻¹¹ M, less than 0.5×10⁻¹¹ M, or less than 1×10⁻¹² M), e.g., as measured in phosphate buffered saline using surface plasmon resonance (SPR).

[0567] In some embodiments, any of the antibodies or antigen-binding fragments described herein has a K_{D} of about 1×10⁻¹² M to about 1×10⁻⁵ M, about 0.5×10⁻⁵ M, about 1×10⁻⁶ M, about 0.5×10⁻⁶ M, about 1×10⁻⁷ M, about 0.5×10⁻⁷ M, about 1×10⁻⁸ M, about 0.5×10⁻⁸ M, about 1×10⁻⁹ M, about 0.5×10⁻⁹ M, about 1×10⁻¹⁰ M, about 0.5×10⁻¹⁰ M, about 1×10⁻¹¹ M, or about 0.5×10⁻¹¹ M (inclusive); about 0.5×10⁻¹¹ M to about 1×10⁻⁵ M, about 0.5×10⁻⁵ M, about 1×10⁻⁶ M, about 0.5×10⁻⁶ M, about 1×10⁻⁷ M, about 0.5×10⁻⁷ M, about 1×10⁻⁸ M, about 0.5×10⁻⁸ M, about 1×10⁻⁹ M, about 0.5×10⁻⁹ M, about 1×10⁻¹⁰ M, about 0.5×10⁻¹⁰ M, or about 1×10⁻¹¹ M (inclusive); about 1×10⁻¹¹ M to about 1×10⁻⁵ M, about 0.5×10⁻⁵ M, about 1×10⁻⁶ M, about 0.5×10⁻⁶ M, about 1×10⁻⁷ M, about 0.5×10⁻⁷ M, about 1×10⁻⁸ M, about 0.5×10⁻⁸ M, about 1×10⁻⁹ M, about 0.5×10⁻⁹ M, about 1×10⁻¹⁰ M, or about 0.5×10⁻¹⁰ M (inclusive); about 0.5×10⁻¹⁰ M to about 1×10⁻⁵ M, about 0.5×10⁻⁵ M, about 1×10⁻⁶ M, about 0.5×10⁻⁶ M, about 1×10⁻⁷ M, about 0.5×10⁻⁷ M, about 1×10⁻⁸ M, about 0.5×10⁻⁸ M, about 1×10⁻⁹ M, about 0.5×10⁻⁹ M, or about 1×10⁻¹⁰ M (inclusive); about 1×10⁻¹⁰ M to about 1×10⁻⁵ M, about 0.5×10⁻⁵ M, about 1×10⁻⁶ M, about 0.5×10⁻⁶ M, about 1×10⁻⁷ M, about 0.5×10⁻⁷ M, about 1×10⁻⁸ M, about 0.5×10⁻⁸ M, about 1×10⁻⁹ M, or about 0.5×10⁻⁹ M (inclusive); about 0.5×10⁻⁹ M to about 1×10⁻⁵ M, about 0.5×10⁻⁵ M, about 1×10⁻⁶ M, about 0.5×10⁻⁶ M, about 1×10⁻⁷ M, about 0.5×10⁻⁷ M, about 1×10⁻⁸ M, about 0.5×10⁻⁸ M, or about 1×10⁻⁹ M (inclusive); about 1×10⁻⁹ M to about 1×10⁻⁵ M, about 0.5×10⁻⁵ M, about 1×10⁻⁶ M, about 0.5×10⁻⁶ M, about 1×10⁻⁷ M, about 0.5×10⁻⁷ M, about 1×10⁻⁸ M, or about 0.5×10⁻⁸ M (inclusive); about 0.5×10⁻⁸ M to about 1×10⁻⁵ M, about 0.5×10⁻⁵ M, about 1×10⁻⁶ M, about 0.5×10⁻⁶ M, about 1×10⁻⁷ M, about 0.5×10⁻⁷ M, or about 1×10⁻⁸ M (inclusive); about 1×10⁻⁸ M to about 1×10⁻⁵ M, about 0.5×10⁻⁵ M, about 1×10⁻⁶ M, about 0.5×10⁻⁶ M, about 1×10⁻⁷ M, or about 0.5×10⁻⁷ M (inclusive); about 0.5×10⁻⁷ M to about 1×10⁻⁵ M, about 0.5×10⁻⁵ M, about 1×10⁻⁶ M, about 0.5×10⁻⁶ M, or about 1×10⁻⁷ M (inclusive); about 1×10⁻⁷ M to about 1×10⁻⁵ M, about 0.5×10⁻⁵ M, about 1×10⁻⁶ M, or about 0.5×10⁻⁶ M (inclusive); about 0.5×10⁻⁶ M to about 1×10⁻⁵ M, about 0.5×10⁻⁵ M, or about 1×10⁻⁶ M (inclusive); about 1×10⁻⁶ M to about 1×10⁻⁵ M or about 0.5×10⁻⁵ M (inclusive); or about 0.5×10⁻⁵ M to about 1×10⁻⁵ M (inclusive), e.g., as measured in phosphate buffered saline using surface plasmon resonance (SPR).

[0568] In some embodiments, any of the antibodies or antigen-binding fragments described herein has a K_{off} of about 1×10⁻⁶ s⁻¹ to about 1×10⁻³ s⁻¹, about 0.5×10⁻³ s⁻¹, about 1×10⁴ s⁻¹, about 0.5×10⁻⁴ s⁻¹, about 1×10⁻⁵ s¹, or about 0.5×10⁻⁵ s⁻¹ (inclusive); about 0.5×10⁻⁵ s¹ to about 1×10⁻³ s⁻¹, about 0.5×10⁻³ s⁻¹, about 1×10⁻⁴ s⁻¹, about 0.5×10⁻⁴ s⁻¹, or about 1×10⁻⁵ s⁻¹ (inclusive); about 1×10⁻⁵ s⁻¹ to about 1×10⁻³ s⁻¹, about 0.5×10⁻³ s⁻¹, about 1×10⁻⁴ s⁻¹, or about 0.5×10⁻⁴ s⁻¹ (inclusive); about 0.5×10⁻⁴ s⁻¹ to about 1×10⁻³ s⁻¹, about 0.5×10⁻³ s⁻¹, or about 1×10⁻⁴ s⁻¹ (inclusive); about 1×10⁻⁴ s⁻¹ to about 1×10⁻³ s⁻¹, or about 0.5×10⁻³ s⁻¹ (inclusive); or about 0.5×10⁻⁵ s⁻¹ to about 1×10⁻³ s⁻¹ (inclusive), e.g., as measured in phosphate buffered saline using surface plasmon resonance (SPR).

[0569] In some embodiments, any of the antibodies or antigen-binding fragments described herein has a Kₒₙ of about 1×10² M-is-1 to about 1×10⁶ M⁻¹s⁻¹, about 0.5×10⁶ M⁻¹s⁻¹, about 1×10⁵ M⁻¹s⁻¹, about 0.5×10⁵ M⁻¹s⁻¹, about 1×10⁴ M⁻¹s⁻¹, about 0.5×10⁴ M⁻¹s⁻¹, about 1×10³ M⁻¹s⁻¹, or about 0.5×10³ M⁻¹s⁻¹ (inclusive); about 0.5×10³ M⁻¹s⁻¹ to about 1×10⁶ M⁻¹s⁻¹, about 0.5×10⁶ M⁻¹s⁻¹, about 1×10⁵ M⁻¹s⁻¹, about 0.5×10⁵ M⁻¹s⁻¹, about 1×10⁴ M⁻¹s⁻¹, about 0.5×10⁴ M⁻¹s⁻¹, or about 1×10³ M⁻¹s⁻¹ (inclusive); about 1×10³ M⁻¹s⁻¹ to about 1×10⁶ M⁻¹s⁻¹, about 0.5×10⁶ M⁻¹s⁻¹, about 1×10⁵ M⁻¹s⁻¹, about 0.5×10⁵ M⁻¹s⁻¹, about 1×10⁴ M⁻¹s⁻¹, or about 0.5×10⁴ M⁻¹s⁻¹ (inclusive); about 0.5×10⁴ M⁻¹s⁻¹ to about 1×10⁶ M⁻¹s⁻¹, about 0.5×10⁶ M⁻¹s⁻¹, about 1×10⁵ M⁻¹s⁻¹, about 0.5×10⁵ M⁻¹s⁻¹, or about 1×10⁴ M⁻¹s⁻¹ (inclusive); about 1×10⁴ M⁻¹s⁻¹ to about 1×10⁶ M⁻¹s⁻¹, about 0.5×10⁶ M⁻¹s⁻¹, about 1×10⁵ M⁻¹s⁻¹, or about 0.5×10⁵ M⁻¹s⁻¹ (inclusive); about 0.5×10⁵ M⁻¹s⁻¹ to about 1×10⁶ M⁻¹s⁻¹, about 0.5×106 M⁻¹s⁻¹, or about 1×10⁵ M⁻¹s⁻¹ (inclusive); about 1×10⁵ M⁻¹s⁻¹ to about 1×10⁶ M⁻¹s⁻¹, or about 0.5×10⁶ M⁻¹s⁻¹ (inclusive); or about 0.5×10⁶ M⁻¹s⁻¹ to about 1×10⁶ M⁻¹s⁻¹ (inclusive), e.g., as measured in phosphate buffered saline using surface plasmon resonance (SPR). Additional examples of CD25 inhibitors that are antibodies or antigen-binding fragments are known in the art.

### CD25 Inhibitors—Fusion Proteins

[0570] In some embodiments, the CD25 inhibitor is a fusion protein. See, e.g., Zhang et al., PNAS 100(4): 1891-1895, 2003.

### CD28 Inhibitors

[0571] The term “CD28 inhibitors” refers to an agent which decreases the ability of CD28 to bind to one or both of CD80 and CD86. CD28 is a receptor that binds to its ligands, CD80 (also called B7.1) and CD86 (called B7.2).

[0572] In some embodiments, the CD28 inhibitor can decrease the binding between CD28 and CD80 by blocking the ability of CD28 to interact with CD80. In some embodiments, the CD28 inhibitor can decrease the binding between CD28 and CD86 by blocking the ability of CD28 to interact with CD86. In some embodiments, the CD28 inhibitor can decrease the binding of CD28 to each of CD80 and CD86.

[0573] In some embodiments, the CD28 inhibitor is an antibody or an antigen-binding fragment thereof, a fusion protein, or peptide. Exemplary CD28 inhibitors are described herein. Additional examples of CD28 inhibitors are known in the art.

[0574] Exemplary sequences for human CD28, human CD80, and human CD86 are shown below.

Human CD28 Isoform 1
(SEQ ID NO: 73)
nkilvkqspmlv aydnavnlsc kysynlfsre fraslhkgld
savevcvvyg nysqqlqvys ktgfncdgkl gnesvtfylq
nlyvnqtdiy fckievmypp pyldneksng tiihvkgkhl
cpsplfpgps kpfwvlvvvg gvlacysllv tvafiifwvr
skrsrllhsd ymnmtprrpg ptrkhyqpya pprdfaayrs
Human CD28 Isoform 2
(SEQ ID NO: 74)
nkilvkqspmlv aydnavnlsw khlcpsplfp gpskpfwvlv
vvggvlacys llvtvafiif wvrskrsrll hsdymnmtpr
rpgptrkhyq pyapprdfaa yrs
Human CD28 Isoform 3
(SEQ ID NO: 75)
khlcpsplfpgp skpfwvlvvv ggvlacysll vtvafiifwv
rskrsrllhs dymnmtprrp gptrkhyqpy apprdfaayr s
Human CD80
(SEQ ID NO: 76)
vihvtk evkevatlsc ghnvsveela qtriywqkek
kmvltmmsgd mniwpeyknr tifditnnls ivilalrpsd
egtyecwlk yekdafkreh laevtlsvka dfptpsisdf
eiptsnirri icstsggfpe phlswlenge elnainttvs
qdpetelyav sskldfnmtt nhsfincliky ghlrvnqtfn
wnttkqehfp dnllpswait lisvngifvi ccltycfapr
crerrrnerl rresvrpv
Human CD86 Isoform 1
(SEQ ID NO: 77)
yfnetadlpc qfansqnqsl selvvfwqdq enlvinevyl
gkekfdsvhs kymgrtsfds dswfirlhnl qikdkglyqc
iihhkkptgm irihqmnsel svlanfsqpe ivpisniten
vyinitcssi hgypepkkms vllrtknsti eydgimqksq
dnvtelydvs islsysfpdv tsnmtifcil etdktrllss
pfsieledpq pppdhipwit avlptviicv mvfclilwkw
kkkkrprnsy kcgtntmere eseqtkkrek ihipersdea
qrvfksskts scdksdtcf
Human CD86 Isoform 2
(SEQ ID NO: 78)
yfneta dlpcqfansq nqslselvvf wqdgenlvin
evylgkekfd svhskymgrt sfdsdswtlr lhnlqikdkg
lyqciihhkk ptgmirihqm nselsvlanf sqpeivpisn
itenvyinit cssihgypep kkmsyllrtk nstieydgim
qksqdnvtel ydvsislsys fpdvtsnmti fciletdktr
llsspfsiel edpqpppdhi pwitavlptv iicvmvfcli
lwkwkkkkrp rnsykcgtnt mereeseqtk krekihiper
sdeaqrvfks sktsscdksd tcf
Human CD86 Isoform 3
(SEQ ID NO: 79)
yfneta dlpcqfansq nqslselvvf wqdgenlvin
evylgkekfd svhskymgrt sfdsdswtlr lhnlqikdkg
lyqciihhkk ptgmirihqm nselsvlanf sqpeivpisn
itenvyinit cssihgypep kkmsyllrtk nstieydgim
qksqdnvtel ydvsislsys fpdvtsnmti fciletdktr
llsspfsigt ntmereeseq tkkrekihip ersdeaqrvf
kssktsscdk sdtcf
Human CD86 Isoform 4
(SEQ ID NO: 80)
eiv pisnitenvy initcssihg ypepkkmsvl lrtknstiey
dgimqksqdn vtelydvsis lsysfpdvts nmtifcilet
dktrllsspf sieledpqpp pdhipwitav lptviicvmv
fclilwkwkk kkrprnsykc gtntmerees eqtkkrekih
ipersdeaqr vfkssktssc dksdtcf
Human CD86 Isoform 5
(SEQ ID NO: 81)
mgrtsfdsds wtlrlhnlqi kdkglyqcii hhkkptgmir
ihqmnselsv lanfsqpeiv pisnitenvy initcssihg
ypepkkmsvl lrtknstiey dgimqksqdn vtelydvsis
lsysfpdvts nmtifcilet dktrllsspf sieledpqpp
pdhipwitav lptviicvmv fclilwkwkk kkrprnsykc
gtntmerees eqtkkrekih ipersdeaqr vfkssktssc
dksdtcf

### CD28 Inhibitors—Antibodies

[0575] In some embodiments, the CD28 inhibitor is an antibody or an antigen-binding fragment thereof (e.g., a Fab or a scFv).

[0576] In some embodiments, the antibody can be a humanized antibody, a chimeric antibody, a multivalent antibody, or a fragment thereof. In some embodiments, an antibody can be a scFv-Fc (Sokolowska-Wedzina et al., Mol. Cancer Res. 15(8):1040-1050, 2017), a VHH domain (Li et al., Immunol. Lett. 188:89-95, 2017), a VNAR domain (Hasler et al., Mol. Immunol. 75:28-37, 2016), a (scFv)₂, a minibody (Kim et al., PLoS One 10(1):e113442, 2014), or a BiTE. In some embodiments, an antibody can be a DVD-Ig (Wu et al., Nat. Biotechnol. 25(11):1290-1297, 2007; WO 08/024188; WO 07/024715), and a dual-affinity re-targeting antibody (DART) (Tsai et al., Mol. Ther. Oncolytics 3:15024, 2016), a triomab (Chelius et al., MAbs 2(3):309-319, 2010), kih IgG with a common LC (Kontermann et al., Drug Discovery Today 20(7):838-847, 2015), a crossmab (Regula et al., EMBO Mol. Med. 9(7):985, 2017), an ortho-Fab IgG (Kontermann et al., Drug Discovery Today 20(7):838-847, 2015), a 2-in-1-IgG (Kontermann et al., Drug Discovery Today 20(7):838-847, 2015), IgG-scFv (Cheal et al., Mol. Cancer Ther. 13(7):1803-1812, 2014), scFv2-Fc (Natsume et al., J. Biochem. 140(3):359-368, 2006), a bi-nanobody (Kontermann et al., Drug Discovery Today 20(7):838-847, 2015), tanden antibody (Kontermann et al., Drug Discovery Today 20(7):838-847, 2015), a DART-Fc (Kontermann et al., Drug Discovery Today 20(7):838-847, 2015), a scFv-HSA-scFv (Kontermann et al., Drug Discovery Today 20(7):838-847, 2015), DNL-Fab3 (Kontermann et al., Drug Discovery Today 20(7):838-847, 2015), DAF (two-in-one or four-in-one), DutaMab, DT-IgG, knobs-in-holes common LC, knobs-in-holes assembly, charge pair antibody, Fab-arm exchange antibody, SEEDbody, Triomab, LUZ-Y, Fcab, kλ-body, orthogonal Fab, DVD-IgG, IgG(H)-scFv, scFv-(H)IgG, IgG(L)-scFv, scFv-(L)-IgG, IgG (L,H)-Fc, IgG(H)-V, V(H)—IgG, IgG(L)-V, V(L)-IgG, KIH IgG-scFab, 2scFv-IgG, IgG-2scFv, scFv4-Ig, Zybody, DVI-IgG, nanobody (e.g., antibodies derived from Camelus bactriamus, Calelus dromaderius, or Lama paccos) (U.S. Pat. No. 5,759,808; Stijlemans et al., J. Biol. Chem. 279:1256-1261, 2004; Dumoulin et al., Nature 424:783-788, 2003; and Pleschberger et al., Bioconjugate Chem. 14:440-448, 2003), nanobody-HSA, a diabody (e.g., Poljak, Structure 2(12):1121-1123, 1994; Hudson et al., J. Immunol. Methods 23(1-2):177-189, 1999), a TandAb (Reusch et al., mAbs 6(3):727-738, 2014), scDiabody (Cuesta et al., Trends in Biotechnol. 28(7):355-362, 2010), scDiabody-CH3 (Sanz et al., Trends in Immunol. 25(2):85-91, 2004), Diabody-CH3 (Guo et al., Triple Body, miniantibody, minibody, TriBi minibody, scFv-CH3 KIH, Fab-scFv, scFv-CH-CL-scFv, F(ab′)2-scFV2, scFv-KIH, Fab-scFv-Fc, tetravalent HCAb, scDiabody-Fc, diabody-Fc, tandem scFv-Fc, intrabody (Huston et al., Human Antibodies 10(3-4):127-142, 2001; Wheeler et al., Mol. Ther. 8(3):355-366, 2003; Stocks, Drug Discov. Today 9(22):960-966, 2004), dock and lock bispecific antibody, ImmTAC, HSAbody, scDiabody-HSA, tandem scFv, IgG-IgG, Cov-X-Body, and scFv1-PEG-scFv2.

[0577] Non-limiting examples of an antigen-binding fragment of an antibody include an Fv fragment, a Fab fragment, a F(ab′)₂ fragment, and a Fab′ fragment. Additional examples of an antigen-binding fragment of an antibody is an antigen-binding fragment of an IgG (e.g., an antigen-binding fragment of IgG1, IgG2, IgG3, or IgG4) (e.g., an antigen-binding fragment of a human or humanized IgG, e.g., human or humanized IgG1, IgG2, IgG3, or IgG4); an antigen-binding fragment of an IgA (e.g., an antigen-binding fragment of IgA1 or IgA2) (e.g., an antigen-binding fragment of a human or humanized IgA, e.g., a human or humanized IgA1 or IgA2); an antigen-binding fragment of an IgD (e.g., an antigen-binding fragment of a human or humanized IgD); an antigen-binding fragment of an IgE (e.g., an antigen-binding fragment of a human or humanized IgE); or an antigen-binding fragment of an IgM (e.g., an antigen-binding fragment of a human or humanized IgM).

[0578] In some embodiments, an antibody can be an IgNAR, a bispecific antibody (Milstein and Cuello, Nature 305:537-539, 1983; Suresh et al., Methods in Enzymology 121:210, 1986; WO 96/27011; Brennan et al., Science 229:81, 1985; Shalaby et al., J. Exp. Med. 175:217-225, 1992; Kolstelny et al., J. Immunol. 148(5):1547-1553, 1992; Hollinger et al., Proc. Natl. Acad. Sci. U.S.A. 90:6444-6448, 1993; Gruber et al., J. Immunol. 152:5368, 1994; Tutt et al., J. Immunol. 147:60, 1991), a bispecific diabody, a triabody (Schoonooghe et al., BMC Biotechnol. 9:70, 2009), a tetrabody, scFv-Fc knobs-into-holes, a scFv-Fc-scFv, a (Fab′scFv)₂, a V-IgG, a IvG-V, a dual V domain IgG, a heavy chain immunoglobulin or a camelid (Holt et al., Trends Biotechnol. 21(11):484-490, 2003), an intrabody, a monoclonal antibody (e.g., a human or humanized monoclonal antibody), a heteroconjugate antibody (e.g., U.S. Pat. No. 4,676,980), a linear antibody (Zapata et al., Protein Eng. 8(10:1057-1062, 1995), a trispecific antibody (Tutt et al., J. Immunol. 147:60, 1991), a Fabs-in-Tandem immunoglobulin (WO 15/103072), or a humanized camelid antibody.

[0579] In some embodiments, the antibody is a humanized antibody, a chimeric antibody, a multivalent antibody, or a fragment thereof. In some embodiments, the antibody is a monoclonal antibody. In some embodiments, the antibody is a humanized monoclonal antibody. See e.g., Hunter & Jones, Nat. Immunol. 16:448-457, 2015; Heo et al., Oncotarget 7(13):15460-15473, 2016. Additional examples of antibodies and antigen-binding fragments thereof are described in U.S. Pat. Nos. 8,440,196; 7,842,144; 8,034,344; and 8,529,895; US 2013/0317203; US 2014/0322239; US 2015/0166666; US 2016/0152714; and US 2017/0002082, each of which is incorporated by reference in its entirety.

[0580] In some embodiments, the CD28 inhibitor is a monovalent Fab′ antibody (e.g., CFR104) (Poirier et al., Am. J. Transplant 15(1): 88-100, 2015).

[0581] Additional examples of CD28 inhibitors that are antibodies or antigen-binding fragments are described in, e.g., U.S. Patent Application Publication Nos. 2017/0240636, 2017/0114136, 2016/0017039, 2015/0376278, 2015/0299321, 2015/0232558, 2015/0150968, 2015/0071916, 2013/0266577, 2013/0230540, 2013/0109846, 2013/0078257, 2013/0078236, 2013/0058933, 2012/0201814, 2011/0097339, 2011/0059071, 2011/0009602, 2010/0266605, 2010/0028354, 2009/0246204, 2009/0117135, 2009/0117108, 2008/0095774, 2008/0038273, 2007/0154468, 2007/0134240, 2007/0122410, 2006/0188493, 2006/0165690, 2006/0039909, 2006/0009382, 2006/0008457, 2004/0116675, 2004/0092718, 2003/0170232, 2003/0086932, 2002/0006403, 2013/0197202, 2007/0065436, 2003/0180290, 2017/0015747, 2012/0100139, and 2007/0148162, each of which is incorporated by reference in its entirety (e.g., sections that described CD28 inhibitors).

[0582] In some embodiments, any of the antibodies or antigen-binding fragments described herein has a dissociation constant (K_{D}) of less than 1×10⁵ M (e.g., less than 0.5×10⁻⁵ M, less than 1×10⁻⁶ M, less than 0.5×10⁻⁶ M, less than 1×10⁻⁷ M, less than 0.5×10⁻⁷ M, less than 1×10⁻⁸ M, less than 0.5×10⁻⁸ M, less than 1×10⁻⁹ M, less than 0.5×10⁻⁹ M, less than 1×10⁻¹⁰ M, less than 0.5×10⁻¹⁰ M, less than 1×10⁻¹¹ M, less than 0.5×10⁻¹¹ M, or less than 1×10⁻¹² M), e.g., as measured in phosphate buffered saline using surface plasmon resonance (SPR).

[0583] In some embodiments, any of the antibodies or antigen-binding fragments described herein has a K_{D} of about 1×10⁻¹² M to about 1×10⁻⁵ M, about 0.5×10⁻⁵ M, about 1×10⁻⁶ M, about 0.5×10⁻⁶ M, about 1×10⁻⁷ M, about 0.5×10⁻⁷ M, about 1×10⁻⁸ M, about 0.5×10⁻⁸ M, about 1×10⁻⁹ M, about 0.5×10⁻⁹ M, about 1×10⁻¹⁰ M, about 0.5×10⁻¹⁰ M, about 1×10⁻¹¹ M, or about 0.5×10⁻¹¹ M (inclusive); about 0.5×10⁻¹¹ M to about 1×10⁻⁵ M, about 0.5×10⁻⁵ M, about 1×10⁻⁶ M, about 0.5×10⁻⁶ M, about 1×10⁻⁷ M, about 0.5×10⁻⁷ M, about 1×10⁻⁸ M, about 0.5×10⁻⁸ M, about 1×10⁻⁹ M, about 0.5×10⁻⁹ M, about 1×10⁻¹⁰ M, about 0.5×10⁻¹⁰ M, or about 1×10⁻¹¹ M (inclusive); about 1×10⁻¹¹ M to about 1×10⁻⁵ M, about 0.5×10⁻⁵ M, about 1×10⁻⁶ M, about 0.5×10⁻⁶ M, about 1×10⁻⁷ M, about 0.5×10⁻⁷ M, about 1×10⁻⁸ M, about 0.5×10⁻⁸ M, about 1×10⁻⁹ M, about 0.5×10⁻⁹ M, about 1×10⁻¹⁰ M, or about 0.5×10⁻¹⁰ M (inclusive); about 0.5×10⁻¹⁰ M to about 1×10⁻⁵ M, about 0.5×10⁻⁵ M, about 1×10⁻⁶ M, about 0.5×10⁻⁶ M, about 1×10⁻⁷ M, about 0.5×10⁻⁷ M, about 1×10⁻⁸ M, about 0.5×10⁻⁸ M, about 1×10⁻⁹ M, about 0.5×10⁻⁹ M, or about 1×10⁻¹⁰ M (inclusive); about 1×10⁻¹⁰ M to about 1×10⁻⁵ M, about 0.5×10⁻⁵ M, about 1×10⁻⁶ M, about 0.5×10⁻⁶ M, about 1×10⁻⁷ M, about 0.5×10⁻⁷ M, about 1×10⁻⁸ M, about 0.5×10⁻⁸ M, about 1×10⁻⁹ M, or about 0.5×10⁻⁹ M (inclusive); about 0.5×10⁻⁹ M to about 1×10⁻⁵ M, about 0.5×10⁻⁵ M, about 1×10⁻⁶ M, about 0.5×10⁻⁶ M, about 1×10⁻⁷ M, about 0.5×10⁻⁷ M, about 1×10⁻⁸ M, about 0.5×10⁻⁸ M, or about 1×10⁻⁹ M (inclusive); about 1×10⁻⁹ M to about 1×10⁻⁵ M, about 0.5×10⁻⁵ M, about 1×10⁻⁶ M, about 0.5×10⁻⁶ M, about 1×10⁻⁷ M, about 0.5×10⁻⁷ M, about 1×10⁻⁸ M, or about 0.5×10⁻⁸ M (inclusive); about 0.5×10⁻⁸ M to about 1×10⁻⁵ M, about 0.5×10⁻⁵ M, about 1×10⁻⁶ M, about 0.5×10⁻⁶ M, about 1×10⁻⁷ M, about 0.5×10⁻⁷ M, or about 1×10⁻⁸ M (inclusive); about 1×10⁻⁸ M to about 1×10⁻⁵ M, about 0.5×10⁻⁵ M, about 1×10⁻⁶ M, about 0.5×10⁻⁶ M, about 1×10⁻⁷ M, or about 0.5×10⁻⁷ M (inclusive); about 0.5×10⁻⁷ M to about 1×10⁻⁵ M, about 0.5×10⁻⁵ M, about 1×10⁻⁶ M, about 0.5×10⁻⁶ M, or about 1×10⁻⁷ M (inclusive); about 1×10⁻⁷ M to about 1×10⁻⁵ M, about 0.5×10⁻⁵ M, about 1×10⁻⁶ M, or about 0.5×10⁻⁶ M (inclusive); about 0.5×10⁻⁶ M to about 1×10⁻⁵ M, about 0.5×10⁻⁵ M, or about 1×10⁻⁶ M (inclusive); about 1×10⁻⁶ M to about 1×10⁻⁵ M or about 0.5×10⁻⁵ M (inclusive); or about 0.5×10⁻⁵ M to about 1×10⁻⁵ M (inclusive), e.g., as measured in phosphate buffered saline using surface plasmon resonance (SPR).

[0584] In some embodiments, any of the antibodies or antigen-binding fragments described herein has a K_{off} of about 1×10⁻⁶ s⁻¹ to about 1×10⁻³ s⁻¹, about 0.5×10⁻³ s⁻¹, about 1×10⁻⁴ s⁻¹, about 0.5×10⁻⁴ s⁻¹, about 1×10⁻⁵ s⁻¹, or about 0.5×10⁻⁵ s⁻¹ (inclusive); about 0.5×10⁻⁵ s⁻¹ to about 1×10⁻³ s⁻¹, about 0.5×10⁻³ s⁻¹, about 1×10⁻⁴ s⁻¹, about 0.5×10⁻⁴ s⁻¹, or about 1×10⁻⁵ s⁻¹ (inclusive); about 1×10⁻⁵ s⁻¹ to about 1×10⁻³ s⁻¹, about 0.5×10⁻³ s⁻¹, about 1×10⁻⁴ s⁻¹, or about 0.5×10⁻⁴ s⁻¹ (inclusive); about 0.5×10⁻⁴ s⁻¹ to about 1×10⁻³ s⁻¹, about 0.5×10⁻³ s⁻¹, or about 1×10⁻⁴ s⁻¹ (inclusive); about 1×10⁻⁴ s⁻¹ to about 1×10⁻³ s⁻¹, or about 0.5×10⁻³ s⁻¹ (inclusive); or about 0.5×10⁻⁵ s⁻¹ to about 1×10⁻³ s⁻¹ (inclusive), e.g., as measured in phosphate buffered saline using surface plasmon resonance (SPR).

[0585] In some embodiments, any of the antibodies or antigen-binding fragments described herein has a Kₒₙ of about 1×10² M⁻¹s⁻¹ to about 1×10⁶ M⁻¹s⁻¹, about 0.5×10⁶ M⁻¹s⁻¹, about 1×10⁵ M⁻¹s⁻¹, about 0.5×10⁵ M⁻¹s⁻¹, about 1×10⁴ M⁻¹s⁻¹, about 0.5×10⁴ M⁻¹s⁻¹, about 1×10³ M⁻¹s⁻¹, or about 0.5×10³ M⁻¹s⁻¹ (inclusive); about 0.5×10³ M⁻¹s⁻¹ to about 1×10⁶ M⁻¹s⁻¹, about 0.5×10⁶ M⁻¹s⁻¹, about 1×10⁵ M⁻¹s⁻¹, about 0.5×10⁵ M⁻¹s⁻¹, about 1×10⁴ M⁻¹s⁻¹, about 0.5×10⁴ M⁻¹s⁻¹, or about 1×10³ M⁻¹s⁻¹ (inclusive); about 1×10³ M⁻¹s⁻¹ to about 1×10⁶ M⁻¹s⁻¹, about 0.5×10⁶ M⁻¹s⁻¹, about 1×10⁵ M⁻¹s⁻¹, about 0.5×10⁵ M⁻¹s⁻¹, about 1×10⁴ M⁻¹s⁻¹, or about 0.5×10⁴ M⁻¹s⁻¹ (inclusive); about 0.5×10⁴ M⁻¹s⁻¹ to about 1×10⁶ M⁻¹s⁻¹, about 0.5×10⁶ M⁻¹s⁻¹, about 1×10⁵ M⁻¹s⁻¹, about 0.5×10⁵ M⁻¹s⁻¹, or about 1×10⁴ M⁻¹s⁻¹ (inclusive); about 1×10⁴ M⁻¹s⁻¹ to about 1×10⁶ M⁻¹s⁻¹, about 0.5×10⁶ M⁻¹s⁻¹, about 1×10⁵ M⁻¹s⁻¹, or about 0.5×10⁵ M⁻¹s⁻¹ (inclusive); about 0.5×10⁵ M⁻¹s⁻¹ to about 1×10⁶ M⁻¹s⁻¹, about 0.5×10⁶ M⁻¹s⁻¹, or about 1×10⁵ M⁻¹s⁻¹ (inclusive); about 1×10⁵ M⁻¹s⁻¹ to about 1×10⁶ M⁻¹s⁻¹, or about 0.5×10⁶ M⁻¹s⁻¹ (inclusive); or about 0.5×10⁶ M⁻¹s⁻¹ to about 1×10⁶ M⁻¹s⁻¹ (inclusive), e.g., as measured in phosphate buffered saline using surface plasmon resonance (SPR).

[0586] Additional examples of CD28 inhibitors that are antibodies or antigen-binding fragments are known in the art.

### CD28 Inhibitors—Fusion Proteins and Peptides

[0587] In some embodiments, the CD28 inhibitor is a fusion protein (see, e.g., U.S. Pat. No. 5,521,288; and US 2002/0018783). In some embodiments, the CD28 inhibitor is abatacept (Orencia®) (Herrero-Beaumont et al., Rheumatol. Clin. 8: 78-83, 2012; and Korhonen and Moilanen Basic Clin. Pharmacol. Toxicol. 104(4): 276-284, 2009).

[0588] In some embodiments, the CD28 inhibitor is a peptide mimetic (e.g., AB103) (see, e.g., Bulger et al., JAMA Surg. 149(6): 528-536, 2014), or a synthetical peptoid (see, e.g., Li et al., Cell Mol. Immunol. 7(2): 133-142, 2010).

### CD49 Inhibitors

[0589] The term “CD49 inhibitors” refers to an agent which decreases the ability of CD49 to bind to one of its ligands (e.g., MMP1). In some embodiments, the CD49 inhibitor is an antibody or an antigen-binding fragment thereof. Exemplary CD49 inhibitors are described herein. Additional examples of CD49 inhibitors are known in the art.

[0590] Exemplary sequences for human CD49 and human MMP1 are shown below.

Human CD49
(SEQ ID NO: 82)
mgpertgaap lplllvlals qgilncclay nvglpeakif
sgpsseqfgy avqqfinpkg nwllvgspws gfpenrmgdv
ykcpvdlsta tceklnlqts tsipnvtemk tnmslglilt
rnmgtggflt cgplwaqqcg nqyyttgvcs dispdfqlsa
sfspatqpcp slidvvvvcd esnsiypwda vknflekfvq
gldigptktq vgliqyannp rvvfnlntyk tkeemivats
qtsqyggdlt ntfgaiqyar kyaysaasgg rrsatkvmvy
vtdgeshdgs mlkavidqcn hdnilrfgia vlgylnrnal
dtknlikeik aiasiptery ffnvsdeaal lekagtlgeq
ifsiegtvqg gdnfqmemsq vgfsadyssq ndilmlgavg
afgwsgtivq ktshghlifp kqafdqilqd rnhssylgys
vaaistgest hfvagapran ytgqivlysv nengnitviq
ahrgdqigsy fgsylcsydy dkdfitdyll vgapmymsdl
kkeegrvylf tikkgilgqh qflegpegie ntrfgsaiaa
lsdinmdgfn dvivgsplen qnsgavyiyn ghqgfirtky
sqkilgsdga frshlqyfgr sldgygdlng dsitdvsiga
fgqvvqlwsq siadvaieas ftpekitivn knaqiilklc
fsakfrptkq nnqvaivyni tldadgfssr vtsrglfken
nerclqknmv vnqaqscpeh iiyiqepsdv vnsldlrydi
slenpgtspa leaysetakv fsipfhkdcg edglcisdlv
ldvrqipaaq eqpfivsnqn krltfsvtlk nkresayntg
ivvdfsenlf fasfslpvdg tevtcqvaas qksvacdvgy
palkreqqvt ftinfdfnlq nlqnqaslsf qalsesqeen
kadnlvnlki pllydaeihl trstninfye issdgnvpsi
vhsfedvgpk fifslkvttg svpvsmatvi ihipqytkek
nplmyltgvq tdkagdiscn adinplkigq tsssysfkse
nfrhtkelnc rtascsnvtc wlkdvhmkge yfvnyttriw
ngtfasstfq tvqltaaaei ntynpeiyvi edntytiplm
imkpdekaev ptgviigsii agillllalv ailwklgffk
rkyekmtknp deidettels s
Human MMP1
(SEQ ID NO: 83)
mhsfppllll lfwgvvshsf patletqeqd vdlyqkylek
yynlkndgrq vekrrnsgpv veklkqmqef fglkvtgkpd
aetlkvmkqp rcgvpdvaqf vltegnprwe qthltyrien
ytpdlpradv dhaiekafql wsnvtpltft kvsegqadim
isfvrgdhrd nspfdgpggn lahafqpgpg iggdahfded
erwtnnfrey nlhrvaahel ghslglshst digalmypsy
tfsgdyglaq ddidgiqaiy grsqnpvqpi gpqtpkacds
kltfdaitti rgevmffkdr fymrtnpfyp evelnfisvf
wpqlpnglea ayefadrdev rffkgnkywa vqgqnvlhgy
pkdiyssfgf prtvkhidaa lseentgkty ffvankywry
deykrsmdpg ypkmiandfp gighkvdavf mkdgffyffh
gtrqykfdpk tkriltlqka nswfncrkn

### CD49 Inhibitors—Antibodies

[0591] In some embodiments, the CD49 inhibitor is an antibody or an antigen-binding fragment thereof (e.g., a Fab or a scFv).

[0592] In some embodiments, the antibody can be a humanized antibody, a chimeric antibody, a multivalent antibody, or a fragment thereof. In some embodiments, an antibody can be a scFv-Fc (Sokolowska-Wedzina et al., Mol. Cancer Res. 15(8):1040-1050, 2017), a VHH domain (Li et al., Immunol. Lett. 188:89-95, 2017), a VNAR domain (Hasler et al., Mol. Immunol. 75:28-37, 2016), a (scFv)₂, a minibody (Kim et al., PLoS One 10(1):e113442, 2014), or a BiTE. In some embodiments, an antibody can be a DVD-Ig (Wu et al., Nat. Biotechnol. 25(11):1290-1297, 2007; WO 08/024188; WO 07/024715), and a dual-affinity re-targeting antibody (DART) (Tsai et al., Mol. Ther. Oncolytics 3:15024, 2016), a triomab (Chelius et al., MAbs 2(3):309-319, 2010), kih IgG with a common LC (Kontermann et al., Drug Discovery Today 20(7):838-847, 2015), a crossmab (Regula et al., EMBO Mol. Med. 9(7):985, 2017), an ortho-Fab IgG (Kontermann et al., Drug Discovery Today 20(7):838-847, 2015), a 2-in-1-IgG (Kontermann et al., Drug Discovery Today 20(7):838-847, 2015), IgG-scFv (Cheal et al., Mol. Cancer Ther. 13(7):1803-1812, 2014), scFv2-Fc (Natsume et al., J. Biochem. 140(3):359-368, 2006), a bi-nanobody (Kontermann et al., Drug Discovery Today 20(7):838-847, 2015), tanden antibody (Kontermann et al., Drug Discovery Today 20(7):838-847, 2015), a DART-Fc (Kontermann et al., Drug Discovery Today 20(7):838-847, 2015), a scFv-HSA-scFv (Kontermann et al., Drug Discovery Today 20(7):838-847, 2015), DNL-Fab3 (Kontermann et al., Drug Discovery Today 20(7):838-847, 2015), DAF (two-in-one or four-in-one), DutaMab, DT-IgG, knobs-in-holes common LC, knobs-in-holes assembly, charge pair antibody, Fab-arm exchange antibody, SEEDbody, Triomab, LUZ-Y, Fcab, kλ-body, orthogonal Fab, DVD-IgG, IgG(H)-scFv, scFv-(H)IgG, IgG(L)-scFv, scFv-(L)-IgG, IgG (L,H)-Fc, IgG(H)-V, V(H)-IgG, IgG(L)-V, V(L)-IgG, KIH IgG-scFab, 2scFv-IgG, IgG-2scFv, scFv4-Ig, Zybody, DVI-IgG, nanobody (e.g., antibodies derived from Camelus bactriamus, Calelus dromaderius, or Lama paccos) (U.S. Pat. No. 5,759,808; Stijlemans et al., J. Biol. Chem. 279:1256-1261, 2004; Dumoulin et al., Nature 424:783-788, 2003; and Pleschberger et al., Bioconjugate Chem. 14:440-448, 2003), nanobody-HSA, a diabody (e.g., Poljak, Structure 2(12):1121-1123, 1994; Hudson et al., J. Immunol. Methods 23(1-2):177-189, 1999), a TandAb (Reusch et al., mAbs 6(3):727-738, 2014), scDiabody (Cuesta et al., Trends in Biotechnol. 28(7):355-362, 2010), scDiabody-CH3 (Sanz et al., Trends in Immunol. 25(2):85-91, 2004), Diabody-CH3 (Guo et al., Triple Body, miniantibody, minibody, TriBi minibody, scFv-CH3 KIH, Fab-scFv, scFv-CH-CL-scFv, F(ab′)2-scFV2, scFv-KIH, Fab-scFv-Fc, tetravalent HCAb, scDiabody-Fc, diabody-Fc, tandem scFv-Fc, intrabody (Huston et al., Human Antibodies 10(3-4):127-142, 2001; Wheeler et al., Mol. Ther. 8(3):355-366, 2003; Stocks, Drug Discov. Today 9(22):960-966, 2004), dock and lock bispecific antibody, ImmTAC, HSAbody, scDiabody-HSA, tandem scFv, IgG-IgG, Cov-X-Body, and scFv1-PEG-scFv2.

[0593] Non-limiting examples of an antigen-binding fragment of an antibody include an Fv fragment, a Fab fragment, a F(ab′)₂ fragment, and a Fab′ fragment. Additional examples of an antigen-binding fragment of an antibody is an antigen-binding fragment of an IgG (e.g., an antigen-binding fragment of IgG1, IgG2, IgG3, or IgG4) (e.g., an antigen-binding fragment of a human or humanized IgG, e.g., human or humanized IgG1, IgG2, IgG3, or IgG4); an antigen-binding fragment of an IgA (e.g., an antigen-binding fragment of IgA1 or IgA2) (e.g., an antigen-binding fragment of a human or humanized IgA, e.g., a human or humanized IgA1 or IgA2); an antigen-binding fragment of an IgD (e.g., an antigen-binding fragment of a human or humanized IgD); an antigen-binding fragment of an IgE (e.g., an antigen-binding fragment of a human or humanized IgE); or an antigen-binding fragment of an IgM (e.g., an antigen-binding fragment of a human or humanized IgM).

[0594] In some embodiments, an antibody can be an IgNAR, a bispecific antibody (Milstein and Cuello, Nature 305:537-539, 1983; Suresh et al., Methods in Enzymology 121:210, 1986; WO 96/27011; Brennan et al., Science 229:81, 1985; Shalaby et al., J. Exp. Med. 175:217-225, 1992; Kolstelny et al., J. Immunol. 148(5):1547-1553, 1992; Hollinger et al., Proc. Nat. Acad. Sci. U.S.A. 90:6444-6448, 1993; Gruber et al., J. Immunol. 152:5368, 1994; Tutt et al., J. Immunol. 147:60, 1991), a bispecific diabody, a triabody (Schoonooghe et al., BMC Biotechnol. 9:70, 2009), a tetrabody, scFv-Fc knobs-into-holes, a scFv-Fc-scFv, a (Fab′scFv)₂, a V-IgG, a IvG-V, a dual V domain IgG, a heavy chain immunoglobulin or a camelid (Holt et al., Trends Biotechnol. 21(11):484-490, 2003), an intrabody, a monoclonal antibody (e.g., a human or humanized monoclonal antibody), a heteroconjugate antibody (e.g., U.S. Pat. No. 4,676,980), a linear antibody (Zapata et al., Protein Eng. 8(10:1057-1062, 1995), a trispecific antibody (Tutt et al., J. Immunol. 147:60, 1991), a Fabs-in-Tandem immunoglobulin (WO 15/103072), or a humanized camelid antibody.

[0595] In some embodiments, the antibody is a humanized antibody, a chimeric antibody, a multivalent antibody, or a fragment thereof. In some embodiments, the antibody is a monoclonal antibody. In some embodiments, the antibody is a humanized monoclonal antibody. See e.g., Hunter & Jones, Nat. Immunol. 16:448-457, 2015; Heo et al., Oncotarget 7(13):15460-15473, 2016. Additional examples of antibodies and antigen-binding fragments thereof are described in U.S. Pat. Nos. 8,440,196; 7,842,144; 8,034,344; and 8,529,895; US 2013/0317203; US 2014/0322239; US 2015/0166666; US 2016/0152714; and US 2017/0002082, each of which is incorporated by reference in its entirety.

[0596] In certain embodiments, the antibody comprises or consists of an antigen-binding fragment or portion of natalizumab (Tysabri®; Antegren®) (see, e.g., Pagnini et al., Expert Opin. Biol. Ther. 17(11): 1433-1438, 2017; and Chataway and Miller Neurotherapeutics 10(1): 19-28, 2013; or vatelizumab (ELND-004)).

[0597] In some embodiments, any of the antibodies or antigen-binding fragments described herein has a dissociation constant (K_{D}) of less than 1×10⁻⁵ M (e.g., less than 0.5×10⁻⁵ M, less than 1×10⁻⁶ M, less than 0.5×10⁻⁶ M, less than 1×10⁻⁷ M, less than 0.5×10⁻⁷ M, less than 1×10⁻⁸ M, less than 0.5×10⁻⁸ M, less than 1×10⁻⁹ M, less than 0.5×10⁻⁹ M, less than 1×10⁻¹⁰ M, less than 0.5×10⁻¹⁰ M, less than 1×10⁻¹¹ M, less than 0.5×10⁻¹¹ M, or less than 1×10⁻¹² M), e.g., as measured in phosphate buffered saline using surface plasmon resonance (SPR).

[0598] In some embodiments, any of the antibodies or antigen-binding fragments described herein has a K_{D} of about 1×10⁻¹² M to about 1×10⁻⁵ M, about 0.5×10⁻⁵ M, about 1×10⁻⁶ M, about 0.5×10⁻⁶ M, about 1×10⁻⁷ M, about 0.5×10⁻⁷ M, about 1×10⁻⁸ M, about 0.5×10⁻⁸ M, about 1×10⁻⁹ M, about 0.5×10⁻⁹ M, about 1×10⁻¹⁰ M, about 0.5×10⁻¹⁰ M, about 1×10⁻¹¹ M, or about 0.5×10⁻¹¹ M (inclusive); about 0.5×10⁻¹¹ M to about 1×10⁻⁵ M, about 0.5×10⁻⁵ M, about 1×10⁻⁶ M, about 0.5×10⁻⁶ M, about 1×10⁻⁷ M, about 0.5×10⁻⁷ M, about 1×10⁻⁸ M, about 0.5×10⁻⁸ M, about 1×10⁻⁹ M, about 0.5×10⁻⁹ M, about 1×10⁻¹⁰ M, about 0.5×10⁻¹⁰ M, or about 1×10⁻¹¹ M (inclusive); about 1×10⁻¹¹ M to about 1×10⁻⁵ M, about 0.5×10⁻⁵ M, about 1×10⁻⁶ M, about 0.5×10⁻⁶ M, about 1×10⁻⁷ M, about 0.5×10⁻⁷ M, about 1×10⁻⁸ M, about 0.5×10⁻⁸ M, about 1×10⁻⁹ M, about 0.5×10⁻⁹ M, about 1×10⁻¹⁰ M, or about 0.5×10⁻¹⁰ M (inclusive); about 0.5×10⁻¹⁰ M to about 1×10⁻⁵ M, about 0.5×10⁻⁵ M, about 1×10⁻⁶ M, about 0.5×10⁻⁶ M, about 1×10⁻⁷ M, about 0.5×10⁻⁷ M, about 1×10⁻⁸ M, about 0.5×10⁻⁸ M, about 1×10⁻⁹ M, about 0.5×10⁻⁹ M, or about 1×10⁻¹⁰ M (inclusive); about 1×10⁻¹⁰ M to about 1×10⁻⁵ M, about 0.5×10⁻⁵ M, about 1×10⁻⁶ M, about 0.5×10⁻⁶ M, about 1×10⁻⁷M, about 0.5×10⁻⁷ M, about 1×10⁻⁸ M, about 0.5×10⁻⁸ M, about 1×10⁻⁹ M, or about 0.5×10⁻⁹ M (inclusive); about 0.5×10⁹ M to about 1×10⁻⁵ M, about 0.5×10⁻⁵ M, about 1×10⁻⁶ M, about 0.5×10⁻⁶ M, about 1×10⁻⁷ M, about 0.5×10⁻⁷ M, about 1×10⁻⁸ M, about 0.5×10⁻⁸ M, or about 1×10⁻⁹ M (inclusive); about 1×10⁻⁹ M to about 1×10⁻⁵ M, about 0.5×10⁻⁵ M, about 1×10⁻⁶ M, about 0.5×10⁻⁶ M, about 1×10⁻⁷ M, about 0.5×10⁻⁷ M, about 1×10⁻⁸ M, or about 0.5×10⁻⁸ M (inclusive); about 0.5×10⁻⁸ M to about 1×10⁻⁵ M, about 0.5×10⁻⁵ M, about 1×10⁻⁶ M, about 0.5×10⁻⁶ M, about 1×10⁻⁷ M, about 0.5×10⁻⁷ M, or about 1×10⁻⁸ M (inclusive); about 1×10⁻⁸ M to about 1×10⁻⁵ M, about 0.5×10⁻⁵ M, about 1×10⁻⁶ M, about 0.5×10⁻⁶ M, about 1×10⁻⁷ M, or about 0.5×10⁻⁷ M (inclusive); about 0.5×10⁻⁷ M to about 1×10⁻⁵ M, about 0.5×10⁻⁵ M, about 1×10⁻⁶ M, about 0.5×10⁻⁶ M, or about 1×10⁻⁷ M (inclusive); about 1×10⁻⁷ M to about 1×10⁻⁵ M, about 0.5×10⁻⁵ M, about 1×10⁻⁶ M, or about 0.5×10⁻⁶ M (inclusive); about 0.5×10⁻⁶ M to about 1×10⁻⁵ M, about 0.5×10⁻⁵ M, or about 1×10⁻⁶ M (inclusive); about 1×10⁻⁶ M to about 1×10⁻⁵ M or about 0.5×10⁻⁵ M (inclusive); or about 0.5×10⁻⁵ M to about 1×10⁻⁵ M (inclusive), e.g., as measured in phosphate buffered saline using surface plasmon resonance (SPR).

[0599] In some embodiments, any of the antibodies or antigen-binding fragments described herein has a K_{off} of about 1×10⁻⁶ s⁻¹ to about 1×10⁻³ s⁻¹, about 0.5×10⁻³ s⁻¹, about 1×10⁻⁴ s⁻¹, about 0.5×10⁻⁴ s⁻¹, about 1×10⁻⁵ s⁻¹, or about 0.5×10⁻⁵ s⁻¹ (inclusive); about 0.5×10⁻⁵ s⁻¹ to about 1×10⁻³ s⁻¹, about 0.5×10⁻³ s⁻¹, about 1×10⁻⁴ s⁻¹, about 0.5×10⁻⁴ s⁻¹, or about 1×10⁻⁵ s⁻¹ (inclusive); about 1×10⁻⁵ s⁻¹ to about 1×10⁻³ s⁻¹, about 0.5×10⁻³ s⁻¹, about 1×10⁻⁴ s⁻¹, or about 0.5×10⁻⁴ s⁻¹ (inclusive); about 0.5×10⁻⁴ s⁻¹ to about 1×10⁻³ s⁻¹, about 0.5×10⁻³ s⁻¹, or about 1×10⁻⁴ s⁻¹ (inclusive); about 1×10⁻⁴ s⁻¹ to about 1×10⁻³ s⁻¹, or about 0.5×10⁻³ s⁻¹ (inclusive); or about 0.5×10⁻⁵ s⁻¹ to about 1×10⁻³ s⁻¹ (inclusive), e.g., as measured in phosphate buffered saline using surface plasmon resonance (SPR).

[0600] In some embodiments, any of the antibodies or antigen-binding fragments described herein has a Kₒₙ of about 1×10² M⁻¹s⁻¹ to about 1×10⁶ M⁻¹s⁻¹, about 0.5×10⁶ M⁻¹s⁻¹, about 1×10⁵ M⁻¹s⁻¹, about 0.5×10⁵ M⁻¹s⁻¹, about 1×10⁴ M⁻¹s⁻¹, about 0.5×10⁴ M⁻¹s⁻¹, about 1×10³ M⁻¹s⁻¹, or about 0.5×10³ M⁻¹s⁻¹ (inclusive); about 0.5×10³ M⁻¹s⁻¹ to about 1×10⁶ M⁻¹s⁻¹, about 0.5×10⁶ M⁻¹s⁻¹, about 1×10⁵ M⁻¹s⁻¹, about 0.5×10⁵ M⁻¹s⁻¹, about 1×10⁴ M⁻¹s⁻¹, about 0.5×10⁴ M⁻¹s⁻¹, or about 1×10³ M⁻¹s⁻¹ (inclusive); about 1×10³ M⁻¹s⁻¹ to about 1×10⁶ M⁻¹s⁻¹, about 0.5×10⁶ M⁻¹s⁻¹, about 1×10⁵ M⁻¹s⁻¹, about 0.5×10⁵ M⁻¹s⁻¹, about 1×10⁴ M⁻¹s⁻¹, or about 0.5×10⁴ M⁻¹s⁻¹ (inclusive); about 0.5×10⁴ M⁻¹s⁻¹ to about 1×10⁶ M⁻¹s⁻¹, about 0.5×10⁶ M⁻¹s⁻¹, about 1×10⁵ M⁻¹s⁻¹, about 0.5×10⁵ M⁻¹s⁻¹, or about 1×10⁴ M⁻¹s⁻¹ (inclusive); about 1×10⁴ M⁻¹s⁻¹ to about 1×10⁶ M⁻¹s⁻¹, about 0.5×10⁶ M⁻¹s⁻¹, about 1×10⁵ M⁻¹s⁻¹, or about 0.5×10⁵ M⁻¹s⁻¹ (inclusive); about 0.5×10⁵ M⁻¹s⁻¹ to about 1×10⁶ M⁻¹s⁻¹, about 0.5×106 M⁻¹s⁻¹, or about 1×10⁵ M⁻¹s⁻¹ (inclusive); about 1×10⁵ M⁻¹s⁻¹ to about 1×10⁶ M⁻¹s⁻¹, or about 0.5×10⁶ M⁻¹s⁻¹ (inclusive); or about 0.5×10⁶ M⁻¹s⁻¹ to about 1×10⁶ M⁻¹s⁻¹ (inclusive), e.g., as measured in phosphate buffered saline using surface plasmon resonance (SPR). Additional examples of CD49 inhibitors that are antibodies or antigen-binding fragments are known in the art.

### CD89 Inhibitors

[0601] The term “CD89 inhibitors” refers to an agent which decreases the ability of CD89 to bind to IgA. CD89 is a transmembrane glycoprotein that binds to the heavy-chain constant region of IgA. In some embodiments, the CD89 inhibitor can decrease the binding between CD89 and IgA by blocking the ability of CD89 to interact with IgA. In some embodiments, the CD89 inhibitor is an antibody or an antigen-binding fragment thereof. Exemplary CD89 inhibitors are described herein. Additional examples of CD89 inhibitors are known in the art.

[0602] An exemplary sequence for human CD89 is shown below.

Human CD89
(SEQ ID NO: 84)
mdpkqttllc lvlclgqriq aqegdfpmpf isaksspvip
ldgsvkiqcq aireayltql miiknstyre igrrlkfwne
tdpefvidhm dankagryqc qyrighyrfr ysdtlelvvt
glygkpflsa drglvlmpge nisltcssah ipfdrfslak
egelslpqhq sgehpanfsl gpvdlnvsgi yrcygwynrs
pylwsfpsna lelvvtdsih qdyttqnlir mavaglvlva
llailvenwh shtalnkeas advaepswsq qmcqpgltfa
rtpsvck

### CD89 Inhibitors—Antibodies

[0603] In some embodiments, the CD89 inhibitor is an antibody or an antigen-binding fragment thereof (e.g., a Fab or a scFv).

[0604] In some embodiments, the antibody can be a humanized antibody, a chimeric antibody, a multivalent antibody, or a fragment thereof. In some embodiments, an antibody can be a scFv-Fc (Sokolowska-Wedzina et al., Mol. Cancer Res. 15(8):1040-1050, 2017), a VHH domain (Li et al., Immunol. Lett. 188:89-95, 2017), a VNAR domain (Hasler et al., Mol. Immunol. 75:28-37, 2016), a (scFv)₂, a minibody (Kim et al., PLoS One 10(1):e113442, 2014), or a BiTE. In some embodiments, an antibody can be a DVD-Ig (Wu et al., Nat. Biotechnol. 25(11):1290-1297, 2007; WO 08/024188; WO 07/024715), and a dual-affinity re-targeting antibody (DART) (Tsai et al., Mol. Ther. Oncolytics 3:15024, 2016), a triomab (Chelius et al., MAbs 2(3):309-319, 2010), kih IgG with a common LC (Kontermann et al., Drug Discovery Today 20(7):838-847, 2015), a crossmab (Regula et al., EMBO Mol. Med. 9(7):985, 2017), an ortho-Fab IgG (Kontermann et al., Drug Discovery Today 20(7):838-847, 2015), a 2-in-1-IgG (Kontermann et al., Drug Discovery Today 20(7):838-847, 2015), IgG-scFv (Cheal et al., Mol. Cancer Ther. 13(7):1803-1812, 2014), scFv2-Fc (Natsume et al., J. Biochem. 140(3):359-368, 2006), a bi-nanobody (Kontermann et al., Drug Discovery Today 20(7):838-847, 2015), tanden antibody (Kontermann et al., Drug Discovery Today 20(7):838-847, 2015), a DART-Fc (Kontermann et al., Drug Discovery Today 20(7):838-847, 2015), a scFv-HSA-scFv (Kontermann et al., Drug Discovery Today 20(7):838-847, 2015), DNL-Fab3 (Kontermann et al., Drug Discovery Today 20(7):838-847, 2015), DAF (two-in-one or four-in-one), DutaMab, DT-IgG, knobs-in-holes common LC, knobs-in-holes assembly, charge pair antibody, Fab-arm exchange antibody, SEEDbody, Triomab, LUZ-Y, Fcab, kλ-body, orthogonal Fab, DVD-IgG, IgG(H)-scFv, scFv-(H)IgG, IgG(L)-scFv, scFv-(L)-IgG, IgG (L,H)-Fc, IgG(H)-V, V(H)—IgG, IgG(L)-V, V(L)-IgG, KIH IgG-scFab, 2scFv-IgG, IgG-2scFv, scFv4-Ig, Zybody, DVI-IgG, nanobody (e.g., antibodies derived from Camelus bactriamus, Calelus dromaderius, or Lama paccos) (U.S. Pat. No. 5,759,808; Stijlemans et al., J. Biol. Chem. 279:1256-1261, 2004; Dumoulin et al., Nature 424:783-788, 2003; and Pleschberger et al., Bioconjugate Chem. 14:440-448, 2003), nanobody-HSA, a diabody (e.g., Poljak, Structure 2(12):1121-1123, 1994; Hudson et al., J. Immunol. Methods 23(1-2):177-189, 1999), a TandAb (Reusch et al., mAbs 6(3):727-738, 2014), scDiabody (Cuesta et al., Trends in Biotechnol. 28(7):355-362, 2010), scDiabody-CH3 (Sanz et al., Trends in Immunol. 25(2):85-91, 2004), Diabody-CH3 (Guo et al., Triple Body, miniantibody, minibody, TriBi minibody, scFv-CH3 KIH, Fab-scFv, scFv-CH-CL-scFv, F(ab′)2-scFV2, scFv-KIH, Fab-scFv-Fc, tetravalent HCAb, scDiabody-Fc, diabody-Fc, tandem scFv-Fc, intrabody (Huston et al., Human Antibodies 10(3-4):127-142, 2001; Wheeler et al., Mol. Ther. 8(3):355-366, 2003; Stocks, Drug Discov. Today 9(22):960-966, 2004), dock and lock bispecific antibody, ImmTAC, HSAbody, scDiabody-HSA, tandem scFv, IgG-IgG, Cov-X-Body, and scFv1-PEG-scFv2.

[0605] Non-limiting examples of an antigen-binding fragment of an antibody include an Fv fragment, a Fab fragment, a F(ab′)₂ fragment, and a Fab′ fragment. Additional examples of an antigen-binding fragment of an antibody is an antigen-binding fragment of an IgG (e.g., an antigen-binding fragment of IgG1, IgG2, IgG3, or IgG4) (e.g., an antigen-binding fragment of a human or humanized IgG, e.g., human or humanized IgG1, IgG2, IgG3, or IgG4); an antigen-binding fragment of an IgA (e.g., an antigen-binding fragment of IgA1 or IgA2) (e.g., an antigen-binding fragment of a human or humanized IgA, e.g., a human or humanized IgA1 or IgA2); an antigen-binding fragment of an IgD (e.g., an antigen-binding fragment of a human or humanized IgD); an antigen-binding fragment of an IgE (e.g., an antigen-binding fragment of a human or humanized IgE); or an antigen-binding fragment of an IgM (e.g., an antigen-binding fragment of a human or humanized IgM).

[0606] In some embodiments, an antibody can be an IgNAR, a bispecific antibody (Milstein and Cuello, Nature 305:537-539, 1983; Suresh et al., Methods in Enzymology 121:210, 1986; WO 96/27011; Brennan et al., Science 229:81, 1985; Shalaby et al., J. Exp. Med. 175:217-225, 1992; Kolstelny et al., J. Immunol. 148(5):1547-1553, 1992; Hollinger et al., Proc. Natl. Acad. Sci. U.S.A. 90:6444-6448, 1993; Gruber et al., J. Immunol. 152:5368, 1994; Tutt et al., J. Immunol. 147:60, 1991), a bispecific diabody, a triabody (Schoonooghe et al., BMC Biotechnol. 9:70, 2009), a tetrabody, scFv-Fc knobs-into-holes, a scFv-Fc-scFv, a (Fab′scFv)₂, a V-IgG, a IvG-V, a dual V domain IgG, a heavy chain immunoglobulin or a camelid (Holt et al., Trends Biotechnol. 21(11):484-490, 2003), an intrabody, a monoclonal antibody (e.g., a human or humanized monoclonal antibody), a heteroconjugate antibody (e.g., U.S. Pat. No. 4,676,980), a linear antibody (Zapata et al., Protein Eng. 8(10:1057-1062, 1995), a trispecific antibody (Tutt et al., J. Immunol. 147:60, 1991), a Fabs-in-Tandem immunoglobulin (WO 15/103072), or a humanized camelid antibody.

[0607] In some embodiments, the antibody is a humanized antibody, a chimeric antibody, a multivalent antibody, or a fragment thereof. In some embodiments, the antibody is a monoclonal antibody. In some embodiments, the antibody is a humanized monoclonal antibody. See e.g., Hunter & Jones, Nat. Immunol. 16:448-457, 2015; Heo et al., Oncotarget 7(13):15460-15473, 2016. Additional examples of antibodies and antigen-binding fragments thereof are described in U.S. Pat. Nos. 8,440,196; 7,842,144; 8,034,344; and 8,529,895; US 2013/0317203; US 2014/0322239; US 2015/0166666; US 2016/0152714; and US 2017/0002082, each of which is incorporated by reference in its entirety.

[0608] In certain embodiments, the antibody comprises or consists of an antigen-binding fragment or portion of HF-1020. Additional examples of CD89 antibodies are known in the art (see, e.g., WO 2002/064634).

[0609] In some embodiments, any of the antibodies or antigen-binding fragments described herein has a dissociation constant (K_{D}) of less than 1×10⁻⁵ M (e.g., less than 0.5×10⁻⁵ M, less than 1×10⁻⁶ M, less than 0.5×10⁻⁶ M, less than 1×10⁻⁷ M, less than 0.5×10⁻⁷ M, less than 1×10⁻⁸ M, less than 0.5×10⁻⁸ M, less than 1×10⁻⁹ M, less than 0.5×10⁻⁹ M, less than 1×10⁻¹⁰ M, less than 0.5×10⁻¹⁰ M, less than 1×10⁻¹¹ M, less than 0.5×10⁻¹¹ M, or less than 1×10⁻¹² M), e.g., as measured in phosphate buffered saline using surface plasmon resonance (SPR).

[0610] In some embodiments, any of the antibodies or antigen-binding fragments described herein has a K_{D} of about 1×10⁻¹² M to about 1×10⁻⁵ M, about 0.5×10⁻⁵ M, about 1×10⁻⁶ M, about 0.5×10⁻⁶ M, about 1×10⁻⁷ M, about 0.5×10⁻⁷ M, about 1×10⁻⁸ M, about 0.5×10⁻⁸ M, about 1×10⁻⁹ M, about 0.5×10⁻⁹ M, about 1×10⁻¹⁰ M, about 0.5×10⁻¹⁰ M, about 1×10⁻¹¹ M, or about 0.5×10⁻¹¹ M (inclusive); about 0.5×10⁻¹¹ M to about 1×10⁻⁵ M, about 0.5×10⁻⁵ M, about 1×10⁻⁶ M, about 0.5×10⁻⁶ M, about 1×10⁻⁷ M, about 0.5×10⁻⁷ M, about 1×10⁻⁸ M, about 0.5×10⁻⁸ M, about 1×10⁻⁹ M, about 0.5×10⁻⁹ M, about 1×10⁻¹⁰ M, about 0.5×10⁻¹⁰ M, or about 1×10⁻¹¹ M (inclusive); about 1×10⁻¹¹ M to about 1×10⁻⁵ M, about 0.5×10⁻⁵ M, about 1×10⁻⁶ M, about 0.5×10⁻⁶ M, about 1×10⁻⁷ M, about 0.5×10⁻⁷ M, about 1×10⁻⁸ M, about 0.5×10⁻⁸ M, about 1×10⁻⁹ M, about 0.5×10⁻⁹ M, about 1×10⁻¹⁰ M, or about 0.5×10⁻¹⁰ M (inclusive); about 0.5×10⁻¹⁰ M to about 1×10⁻⁵ M, about 0.5×10⁻⁵ M, about 1×10⁻⁶ M, about 0.5×10⁻⁶ M, about 1×10⁻⁷ M, about 0.5×10⁻⁷ M, about 1×10⁻⁸ M, about 0.5×10⁻⁸ M, about 1×10⁻⁹ M, about 0.5×10⁻⁹ M, or about 1×10⁻¹⁰ M (inclusive); about 1×10⁻¹⁰ M to about 1×10⁻⁵ M, about 0.5×10⁻⁵ M, about 1×10⁻⁶ M, about 0.5×10⁻⁶ M, about 1×10⁻⁷ M, about 0.5×10⁻⁷ M, about 1×10⁻⁸ M, about 0.5×10⁻⁸ M, about 1×10⁻⁹ M, or about 0.5×10⁻⁹ M (inclusive); about 0.5×10⁻⁹ M to about 1×10⁻⁵ M, about 0.5×10⁻⁵ M, about 1×10⁻⁶ M, about 0.5×10⁻⁶ M, about 1×10⁻⁷ M, about 0.5×10⁻⁷ M, about 1×10⁻⁸ M, about 0.5×10⁻⁸ M, or about 1×10⁻⁹ M (inclusive); about 1×10⁻⁹ M to about 1×10⁻⁵ M, about 0.5×10⁻⁵ M, about 1×10⁻⁶ M, about 0.5×10⁻⁶ M, about 1×10⁻⁷ M, about 0.5×10⁻⁷ M, about 1×10⁻⁸ M, or about 0.5×10⁻⁸ M (inclusive); about 0.5×10⁻⁸ M to about 1×10⁻⁵ M, about 0.5×10⁻⁵ M, about 1×10⁻⁶ M, about 0.5×10⁻⁶ M, about 1×10⁻⁷ M, about 0.5×10⁻⁷ M, or about 1×10⁻⁸ M (inclusive); about 1×10⁻⁸ M to about 1×10⁻⁵ M, about 0.5×10⁻⁵ M, about 1×10⁻⁶ M, about 0.5×10⁻⁶ M, about 1×10⁻⁷ M, or about 0.5×10⁻⁷ M (inclusive); about 0.5×10⁻⁷ M to about 1×10⁻⁵ M, about 0.5×10⁻⁵ M, about 1×10⁻⁶ M, about 0.5×10⁻⁶ M, or about 1×10⁻⁷ M (inclusive); about 1×10⁻⁷ M to about 1×10⁻⁵ M, about 0.5×10⁻⁵ M, about 1×10⁻⁶ M, or about 0.5×10⁻⁶ M (inclusive); about 0.5×10⁻⁶ M to about 1×10⁻⁵ M, about 0.5×10⁻⁵ M, or about 1×10⁻⁶ M (inclusive); about 1×10⁻⁶ M to about 1×10⁻⁵ M or about 0.5×10⁻⁵ M (inclusive); or about 0.5×10⁻⁵ M to about 1×10⁻⁵ M (inclusive), e.g., as measured in phosphate buffered saline using surface plasmon resonance (SPR).

[0611] In some embodiments, any of the antibodies or antigen-binding fragments described herein has a K_{off} of about 1×10⁻⁶ s⁻¹ to about 1×10⁻³ s⁻¹, about 0.5×10⁻³ s⁻¹, about 1×10⁻⁴ s⁻¹, about 0.5×10⁻⁴ s⁻¹, about 1×10⁻⁵ s⁻¹, or about 0.5×10⁻⁵ s⁻¹ (inclusive); about 0.5×10⁻⁵ s⁻¹ to about 1×10⁻³ s⁻¹, about 0.5×10⁻³ s⁻¹, about 1×10⁻⁴ s⁻¹, about 0.5×10⁻⁴ s⁻¹, or about 1×10⁻⁵ s⁻¹ (inclusive); about 1×10⁻⁵ s⁻¹ to about 1×10⁻³ s⁻¹, about 0.5×10⁻³ s⁻¹, about 1×10⁻⁴ s⁻¹, or about 0.5×10⁻⁴ s⁻¹ (inclusive); about 0.5×10⁻⁴ s⁻¹ to about 1×10⁻³ s⁻¹, about 0.5×10⁻³ s⁻¹, or about 1×10⁻⁴ s⁻¹ (inclusive); about 1×10⁻⁴ s⁻¹ to about 1×10⁻³ s⁻¹, or about 0.5×10⁻³ s⁻¹ (inclusive); or about 0.5×10⁻⁵ s⁻¹ to about 1×10⁻³ s⁻¹ (inclusive), e.g., as measured in phosphate buffered saline using surface plasmon resonance (SPR).

[0612] In some embodiments, any of the antibodies or antigen-binding fragments described herein has a Kₒₙ of about 1×10² M⁻¹s⁻¹ to about 1×10⁶ M⁻¹s⁻¹, about 0.5×10⁶ M⁻¹s⁻¹, about 1×10⁵ M⁻¹s⁻¹, about 0.5×10⁵ M⁻¹s⁻¹, about 1×10⁴ M⁻¹s⁻¹, about 0.5×10⁴ M⁻¹s⁻¹, about 1×10³ M⁻¹s⁻¹, or about 0.5×10³ M⁻¹s⁻¹ (inclusive); about 0.5×10³ M⁻¹s⁻¹ to about 1×10⁶ M⁻¹s⁻¹, about 0.5×10⁶ M⁻¹s⁻¹, about 1×10⁵ M⁻¹s⁻¹, about 0.5×10⁵ M⁻¹s⁻¹, about 1×10⁴ M⁻¹s⁻¹, about 0.5×10⁴ M⁻¹s⁻¹, or about 1×10³ M⁻¹s⁻¹ (inclusive); about 1×10³ M⁻¹s⁻¹ to about 1×10⁶ M⁻¹s⁻¹, about 0.5×10⁶ M⁻¹s⁻¹, about 1×10⁵ M⁻¹s⁻¹, about 0.5×10⁵ M⁻¹s⁻¹, about 1×10⁴ M⁻¹s⁻¹, or about 0.5×10⁴ M⁻¹s⁻¹ (inclusive); about 0.5×10⁴ M⁻¹s⁻¹ to about 1×10⁶ M⁻¹s⁻¹, about 0.5×10⁶ M⁻¹s⁻¹, about 1×10⁵ M⁻¹s⁻¹, about 0.5×10⁵ M⁻¹s⁻¹, or about 1×10⁴ M⁻¹s⁻¹ (inclusive); about 1×10⁴ M⁻¹s⁻¹ to about 1×10⁶ M⁻¹s⁻¹, about 0.5×10⁶ M⁻¹s⁻¹, about 1×10⁵ M⁻¹s⁻¹, or about 0.5×10⁵ M⁻¹s⁻¹ (inclusive); about 0.5×10⁵ M⁻¹s⁻¹ to about 1×10⁶ M⁻¹s⁻¹, about 0.5×10⁶ M⁻¹s⁻¹, or about 1×10⁵ M⁻¹s⁻¹ (inclusive); about 1×10⁵ M⁻¹s⁻¹ to about 1×10⁶ M⁻¹s⁻¹, or about 0.5×10⁶ M⁻¹s⁻¹ (inclusive); or about 0.5×10⁶ M⁻¹s⁻¹ to about 1×10⁶ M⁻¹s⁻¹ (inclusive), e.g., as measured in phosphate buffered saline using surface plasmon resonance (SPR).

[0613] Additional examples of CD89 inhibitors that are antibodies or antigen-binding fragments are known in the art.

### CD283 (TLR3) Antibodies

[0614] In some embodiments, the therapeutic agent is PRV-300, for example, as described in PCT publication WO 2006/060513 which is incorporated by reference herein in its entirety. PRV-300 is an anti-Toll-Like Receptor 3 (TLR3)/CD283 monoclonal antibody that blocks TLR3 on cell surfaces and in endosomes.

### IL-1 Inhibitors

[0615] The term “IL-1 inhibitor” refers to an agent that decreases the expression of an IL-1 cytokine or an IL-1 receptor and/or decreases the ability of an IL-1 cytokine to bind specifically to an IL-1 receptor. Non-limiting examples of IL-1 cytokines include IL-1α, IL-1β, IL-18, IL-36α, IL-36β, IL-36γ, IL-38, and IL-33. In some examples, an IL-1 cytokine is IL-1α. In some examples, an IL-1 cytokine is IL-1β.

[0616] As is known in the art, IL-1α and IL-1 each binds to a complex of IL-1R1 and IL1RAP proteins; IL-18 binds to IL-18Rα; IL-36α, IL-36β, and IL-36γ each binds to a complex of IL-1RL2 and IL-1RAP proteins; and IL-33 binds to a complex of IL1RL1 and IL1RAP proteins. IL-1Rα is an endogenous soluble protein that decreases the ability of IL-la and IL-1 to bind to their receptor (e.g., a complex of IL-1R1 and IL1RAP proteins). IL-36Rα is an endogenous soluble protein that decreases the ability of IL-36α, IL-36β, and IL-36γ to bind to their receptor (e.g., a complex of IL-1RL2 and IL-1RAP proteins).

[0617] In some embodiments, the IL-1 inhibitor mimicks native human interleukin 1 receptor antagonist (IL1-Ra).

[0618] In some embodiments, the IL-1 inhibitor targets IL-1α. In some embodiments, the IL-1 inhibitor targets IL-1β. In some embodiments, the IL-1 inhibitor targets one or both of IL-1R1 and IL1RAP. For example, an IL-1 inhibitor can decrease the expression of IL-1α and/or decrease the ability of IL-1α to bind to its receptor (e.g., a complex of IL-1R1 and IL1RAP proteins). In another example, an IL-1 inhibitor can decrease the expression of IL-1β and/or decrease the ability of IL-1β to binds to its receptor (e.g., a complex of IL-1R1 and IL1RAP proteins). In some embodiments, an IL-1 inhibitor can decrease the expression of one or both of IL-1R1 and IL1RAP.

[0619] In some embodiments, the IL-1 inhibitor targets IL-18. In some embodiments, the IL-1 inhibitor targets IL-18Rα. In some embodiments, the IL-1 inhibitor decreases the ability of IL-18 to bind to its receptor (e.g., IL-18Ra). In some embodiments, the IL-1 inhibitor decreases the expression of IL-18. In some embodiments, the IL-1 inhibitor decreases the expression of IL-18Ra.

[0620] In some embodiments, the IL-1 inhibitor targets one or more (e.g., two or three) of IL-36α, IL-36β, and IL-36γ. In some embodiments, the IL-1 inhibitor targets one or both of IL-1RL2 and IL-1RAP. In some embodiments, the IL-1 inhibitor decreases the expression of one or more (e.g., two or three) of IL-36α, IL-36β, and IL-36γ. In some embodiments, the IL-1 inhibitor decreases the expression of one or both of IL-1RL2 and IL-1RAP proteins. In some embodiments, the IL-1 inhibitor decreases the ability of IL-36a to bind to its receptor (e.g., a complex including IL-1RL2 and IL-1RAP). In some examples, the IL-1 inhibitor decreases the ability of IL-36β to bind to its receptor (e.g., a complex including IL-1RL2 and IL-1RAP). In some examples, the IL-1 inhibitor decreases the ability of IL-36γ to bind to its receptor (e.g., a complex including IL-1RL2 and IL-1RAP).

[0621] In some embodiments, the IL-1 inhibitor targets IL-33. In some embodiments, the IL-1 inhibitor targets one or both of IL1RL1 and IL1RAP. In some embodiments, the IL-1 inhibitor decreases the expression of IL-33. In some embodiments, the IL-1 inhibitor decreases the expression of one or both of IL1RL1 and IL1RAP. In some embodiments, the IL-1 inhibitor decreases the ability of IL-33 to bind to its receptor (e.g., a complex of IL1RL1 and IL1RAP proteins).

[0622] In some embodiments, an IL-1 inhibitory agent is an inhibitory nucleic acid, an antibody or fragment thereof, or a fusion protein. In some embodiments, the inhibitory nucleic acid is an antisense nucleic acid, a ribozyme, or a small interfering RNA.

### Inhibitory Nucleic Acids

[0623] Inhibitory nucleic acids that can decrease the expression of IL-1α, IL-1β, IL-18, IL-36α, IL-36β, IL-36γ, IL-38, IL-33, IL-1R1, IL1RAP, IL-18Rα, IL-1RL2, or IL1RL1 mRNA expression in a mammalian cell include antisense nucleic acid molecules, i.e., nucleic acid molecules whose nucleotide sequence is complementary to all or part of an IL-1α, IL-1β, IL-18, IL-36α, IL-36β, IL-36γ, IL-38, IL-33, IL-1R1, IL1RAP, IL-18Rα, IL-1RL2, or IL1RL1 mRNA (e.g., complementary to all or a part of any one of SEQ ID NOs: 85-125).

| Human IL-1α mRNA | |
|---|---|
| (SEQ ID NO: 85) | |
| 1 | agtaaccagg caacaccatt gaaggctcat atgtaaaaat ccatgccttc ctttctccca |
| 61 | atctccattc ccaaacttag ccactggctt ctggctgagg ccttacgcat acctcccggg |
| 121 | gcttgcacac accttcttct acagaagaca caccttgggc atatcctaca gaagaccagg |
| 181 | cttctctctg gtccttggta gagggctact ttactgtaac agggccaggg tggagagttc |
| 241 | tctcctgaag ctccatcccc tctataggaa atgtgttgac aatattcaga agagtaagag |
| 301 | gatcaagact tctttgtgct caaataccac tgttctcttc tctaccctgc cctaaccagg |
| 361 | agcttgtcac cccaaactct gaggtgattt atgccttaat caagcaaact tccctcttca |
| 421 | gaaaagatgg ctcattttcc ctcaaaagtt gccaggagct gccaagtatt ctgccaattc |
| 481 | accctggagc acaatcaaca aattcagcca gaacacaact acagctacta ttagaactat |
| 541 | tattattaat aaattcctct ccaaatctag ccccttgact tcggatttca cgatttctcc |
| 601 | cttcctccta gaaacttgat aagtttcccg cgcttccctt tttctaagac tacatgtttg |
| 661 | tcatcttata aagcaaaggg gtgaataaat gaaccaaatc aataacttct ggaatatctg |
| 721 | caaacaacaa taatatcagc tatgccatct ttcactattt tagccagtat cgagttgaat |
| 781 | gaacatagaa aaatacaaaa ctgaattctt ccctgtaaat tccccgtttt gacgacgcac |
| 841 | ttgtagccac gtagccacgc ctacttaaga caattacaaa aggcgaagaa gactgactca |
| 901 | ggcttaagct gccagccaga gagggagtca tttcattggc gtttgagtca gcaaagaagt |
| 961 | caagatggcc aaagttccag acatgtttga agacctgaag aactgttaca gtgaaaatga |
| 1021 | agaagacagt tcctccattg atcatctgtc tctgaatcag aaatccttct atcatgtaag |
| 1081 | ctatggccca ctccatgaag gctgcatgga tcaatctgtg tctctgagta tctctgaaac |
| 1141 | ctctaaaaca tccaagctta ccttcaagga gagcatggtg gtagtagcaa ccaacgggaa |
| 1201 | ggttctgaag aagagacggt tgagtttaag ccaatccatc actgatgatg acctggaggc |
| 1261 | catcgccaat gactcagagg aagaaatcat caagcctagg tcagcacctt ttagcttcct |
| 1321 | gagcaatgtg aaatacaact ttatgaggat catcaaatac gaattcatcc tgaatgacgc |
| 1381 | cctcaatcaa agtataattc gagccaatga tcagtacctc acggctgctg cattacataa |
| 1441 | tctggatgaa gcagtgaaat ttgacatggg tgcttataag tcatcaaagg atgatgctaa |
| 1501 | aattaccgtg attctaagaa tctcaaaaac tcaattgtat gtgactgccc aagatgaaga |
| 1561 | ccaaccagtg ctgctgaagg agatgcctga gatacccaaa accatcacag gtagtgagac |
| 1621 | caacctcctc ttcttctggg aaactcacgg cactaagaac tatttcacat cagttgccca |
| 1681 | tccaaacttg tttattgcca caaagcaaga ctactgggtg tgcttggcag gggggccacc |
| 1741 | ctctatcact gactttcaga tactggaaaa ccaggcgtag gtctggagtc tcacttgtct |
| 1801 | cacttgtgca gtgttgacag ttcatatgta ccatgtacat gaagaagcta aatcctttac |
| 1861 | tgttagtcat ttgctgagca tgtactgagc cttgtaattc taaatgaatg tttacactct |
| 1921 | ttgtaagagt ggaaccaaca ctaacatata atgttgttat ttaaagaaca ccctatattt |
| 1981 | tgcatagtac caatcatttt aattattatt cttcataaca attttaggag gaccagagct |
| 2041 | actgactatg gctaccaaaa agactctacc catattacag atgggcaaat taaggcataa |
| 2101 | gaaaactaag aaatatgcac aatagcagtt gaaacaagaa gccacagacc taggatttca |
| 2161 | tgatttcatt tcaactgttt gccttctact tttaagttgc tgatgaactc ttaatcaaat |
| 2221 | agcataagtt tctgggacct cagttttatc attttcaaaa tggagggaat aatacctaag |
| 2281 | ccttcctgcc gcaacagttt tttatgctaa tcagggaggt cattttggta aaatacttct |
| 2341 | tgaagccgag cctcaagatg aaggcaaagc acgaaatgtt attttttaat tattatttat |
| 2401 | atatgtattt ataaatatat ttaagataat tataatatac tatatttatg ggaacccctt |
| 2461 | catcctctga gtgtgaccag gcatcctcca caatagcaga cagtgttttc tgggataagt |
| 2521 | aagtttgatt tcattaatac agggcatttt ggtccaagtt gtgcttatcc catagccagg |
| 2581 | aaactctgca ttctagtact tgggagacct gtaatcatat aataaatgta cattaattac |
| 2641 | cttgagccag taattggtcc gatctttgac tcttttgcca ttaaacttac ctgggcattc |
| 2701 | ttgtttcaat tccacctgca atcaagtcct acaagctaaa attagatgaa ctcaactttg |
| 2761 | acaaccatga gaccactgtt atcaaaactt tcttttctgg aatgtaatca atgtttcttc |
| 2821 | taggttctaa aaattgtgat cagaccataa tgttacatta ttatcaacaa tagtgattga |
| 2881 | tagagtgtta tcagtcataa ctaaataaag cttgcaacaa aattctctga caaaaaaaaa |
| 2941 | aaaaaaa |
| Human IL-1β mRNA | |
| (SEQ ID NO: 86) | |
| 1 | accaaacctc ttcgaggcac aaggcacaac aggctgctct gggattctct tcagccaatc |
| 61 | ttcattgctc aagtgtctga agcagccatg gcagaagtac ctgagctcgc cagtgaaatg |
| 121 | atggcttatt acagtggcaa tgaggatgac ttgttctttg aagctgatgg ccctaaacag |
| 181 | atgaagtgct ccttccagga cctggacctc tgccctctgg atggcggcat ccagctacga |
| 241 | atctccgacc accactacag caagggcttc aggcaggccg cgtcagttgt tgtggccatg |
| 301 | gacaagctga ggaagatgct ggttccctgc ccacagacct tccaggagaa tgacctgagc |
| 361 | accttctttc ccttcatctt tgaagaagaa cctatcttct tcgacacatg ggataacgag |
| 421 | gcttatgtgc acgatgcacc tgtacgatca ctgaactgca cgctccggga ctcacagcaa |
| 481 | aaaagcttgg tgatgtctgg tccatatgaa ctgaaagctc tccacctcca gggacaggat |
| 541 | atggagcaac aagtggtgtt ctccatgtcc tttgtacaag gagaagaaag taatgacaaa |
| 601 | atacctgtgg ccttgggcct caaggaaaag aatctgtacc tgtcctgcgt gttgaaagat |
| 661 | gataagccca ctctacagct ggagagtgta gatcccaaaa attacccaaa gaagaagatg |
| 721 | gaaaagcgat ttgtcttcaa caagatagaa atcaataaca agctggaatt tgagtctgcc |
| 781 | cagttcccca actggtacat cagcacctct caagcagaaa acatgcccgt cttcctggga |
| 841 | gggaccaaag gcggccagga tataactgac ttcaccatgc aatttgtgtc ttcctaaaga |
| 901 | gagctgtacc cagagagtcc tgtgctgaat gtggactcaa tccctagggc tggcagaaag |
| 961 | ggaacagaaa ggtttttgag tacggctata gcctggactt tcctgttgtc tacaccaatg |
| 1021 | cccaactgcc tgccttaggg tagtgctaag aggatctcct gtccatcagc caggacagtc |
| 1081 | agctctctcc tttcagggcc aatccccagc ccttttgttg agccaggcct ctctcacctc |
| 1141 | tcctactcac ttaaagcccg cctgacagaa accacggcca catttggttc taagaaaccc |
| 1201 | tctgtcattc gctcccacat tctgatgagc aaccgcttcc ctatttattt atttatttgt |
| 1261 | ttgtttgttt tattcattgg tctaatttat tcaaaggggg caagaagtag cagtgtctgt |
| 1321 | aaaagagcct agtttttaat agctatggaa tcaattcaat ttggactggt gtgctctctt |
| 1381 | taaatcaagt cctttaatta agactgaaaa tatataagct cagattattt aaatgggaat |
| 1441 | atttataaat gagcaaatat catactgttc aatggttctg aaataaactt cactgaag |
| Human IL-18 mRNA Variant 1 | |
| (SEQ ID NO: 87) | |
| 1 | attctctccc cagcttgctg agccctttgc tcccctggcg actgcctgga cagtcagcaa |
| 61 | ggaattgtct cccagtgcat tttgccctcc tggctgccaa ctctggctgc taaagcggct |
| 121 | gccacctgct gcagtctaca cagcttcggg aagaggaaag gaacctcaga ccttccagat |
| 181 | cgcttcctct cgcaacaaac tatttgtcgc aggaataaag atggctgctg aaccagtaga |
| 241 | agacaattgc atcaactttg tggcaatgaa atttattgac aatacgcttt actttatagc |
| 301 | tgaagatgat gaaaacctgg aatcagatta ctttggcaag cttgaatcta aattatcagt |
| 361 | cataagaaat ttgaatgacc aagttctctt cattgaccaa ggaaatcggc ctctatttga |
| 421 | agatatgact gattctgact gtagagataa tgcaccccgg accatattta ttataagtat |
| 481 | gtataaagat agccagccta gaggtatggc tgtaactatc tctgtgaagt gtgagaaaat |
| 541 | ttcaactctc tcctgtgaga acaaaattat ttcctttaag gaaatgaatc ctcctgataa |
| 601 | catcaaggat acaaaaagtg acatcatatt ctttcagaga agtgtcccag gacatgataa |
| 661 | taagatgcaa tttgaatctt catcatacga aggatacttt ctagcttgtg aaaaagagag |
| 721 | agaccttttt aaactcattt tgaaaaaaga ggatgaattg ggggatagat ctataatgtt |
| 781 | cactgttcaa aacgaagact agctattaaa atttcatgcc gggcgcagtg gctcacgcct |
| 841 | gtaatcccag ccctttggga ggctgaggcg ggcagatcac cagaggtcag gtgttcaaga |
| 901 | ccagcctgac caacatggtg aaacctcatc tctactaaaa atacaaaaaa ttagctgagt |
| 961 | gtagtgacgc atgccctcaa tcccagctac tcaagaggct gaggcaggag aatcacttgc |
| 1021 | actccggagg tagaggttgt ggtgagccga gattgcacca ttgcgctcta gcctgggcaa |
| 1081 | caacagcaaa actccatctc aaaaaataaa ataaataaat aaacaaataa aaaattcata |
| 1141 | atgtgaaaaa aaaaaaaaaa aaa |
| Human IL-18 mRNA Variant 2 | |
| (SEQ ID NO: 88) | |
| 1 | attctctccc cagcttgctg agccctttgc tcccctggcg actgcctgga cagtcagcaa |
| 61 | ggaattgtct cccagtgcat tttgccctcc tggctgccaa ctctggctgc taaagcggct |
| 121 | gccacctgct gcagtctaca cagcttcggg aagaggaaag gaacctcaga ccttccagat |
| 181 | cgcttcctct cgcaacaaac tatttgtcgc aggaataaag atggctgctg aaccagtaga |
| 241 | agacaattgc atcaactttg tggcaatgaa atttattgac aatacgcttt actttataga |
| 301 | aaacctggaa tcagattact ttggcaagct tgaatctaaa ttatcagtca taagaaattt |
| 361 | gaatgaccaa gttctcttca ttgaccaagg aaatcggcct ctatttgaag atatgactga |
| 421 | ttctgactgt agagataatg caccccggac catatttatt ataagtatgt ataaagatag |
| 481 | ccagcctaga ggtatggctg taactatctc tgtgaagtgt gagaaaattt caactctctc |
| 541 | ctgtgagaac aaaattattt cctttaagga aatgaatcct cctgataaca tcaaggatac |
| 601 | aaaaagtgac atcatattct ttcagagaag tgtcccagga catgataata agatgcaatt |
| 661 | tgaatcttca tcatacgaag gatactttct agcttgtgaa aaagagagag acctttttaa |
| 721 | actcattttg aaaaaagagg atgaattggg ggatagatct ataatgttca ctgttcaaaa |
| 781 | cgaagactag ctattaaaat ttcatgccgg gcgcagtggc tcacgcctgt aatcccagcc |
| 841 | ctttgggagg ctgaggcggg cagatcacca gaggtcaggt gttcaagacc agcctgacca |
| 901 | acatggtgaa acctcatctc tactaaaaat acaaaaaatt agctgagtgt agtgacgcat |
| 961 | gccctcaatc ccagctactc aagaggctga ggcaggagaa tcacttgcac tccggaggta |
| 1021 | gaggttgtgg tgagccgaga ttgcaccatt gcgctctagc ctgggcaaca acagcaaaac |
| 1081 | tccatctcaa aaaataaaat aaataaataa acaaataaaa aattcataat gtgaaaaaaa |
| 1141 | aaaaaaaaaa a |
| Human IL-36α mRNA | |
| (SEQ ID NO: 89) | |
| 1 | aaaacccaag tgcagtagaa gccattgttc ataatggtag ggatacaggg tccttcgtaa |
| 61 | cagattatca gtgtggccta tgctggaaag tctggtgacc tctgattttt tttgcttcca |
| 121 | ggtctttggc cttggcactc tttgtcatat tagagttcct gggtctaggc ctgggcagga |
| 181 | ttcataggtg cagctgcttc tgctggaggt agactgcatc caacaaagta agggtgctgg |
| 241 | gtgagttctg ggagtataga ttctgactgg ggtcactgct gggctggccg ccagtctttc |
| 301 | atctgaccca gggttaaact gtggcttggg actgactcag gtcctctctt ggggtcggtc |
| 361 | tgcacataaa aggactccta tccttggcag ttctgaaaca acaccaccac aatggaaaaa |
| 421 | gcattgaaaa ttgacacacc tcagcagggg agcattcagg atatcaatca tcgggtgtgg |
| 481 | gttcttcagg accagacgct catagcagtc ccgaggaagg accgtatgtc tccagtcact |
| 541 | attgccttaa tctcatgccg acatgtggag acccttgaga aagacagagg gaaccccatc |
| 601 | tacctgggcc tgaatggact caatctctgc ctgatgtgtg ctaaagtcgg ggaccagccc |
| 661 | acactgcagc tgaaggaaaa ggatataatg gatttgtaca accaacccga gcctgtgaag |
| 721 | tcctttctct tctaccacag ccagagtggc aggaactcca ccttcgagtc tgtggctttc |
| 781 | cctggctggt tcatcgctgt cagctctgaa ggaggctgtc ctctcatcct tacccaagaa |
| 841 | ctggggaaag ccaacactac tgactttggg ttaactatgc tgttttaa |
| Human IL-36β mRNA Variant 1 | |
| (SEQ ID NO: 90) | |
| 1 | cacgggttcc tccccactct gtctttctca cctctccttc acttttccta gcctcctcac |
| 61 | caccatctga tctatcttgt tctcttcaca aaaggctctg aagacatcat gaacccacaa |
| 121 | cgggaggcag cacccaaatc ctatgctatt cgtgattctc gacagatggt gtgggtcctg |
| 181 | agtggaaatt ctttaatagc agctcctctt agccgcagca ttaagcctgt cactcttcat |
| 241 | ttaatagcct gtagagacac agaattcagt gacaaggaaa agggtaatat ggtttacctg |
| 301 | ggaatcaagg gaaaagatct ctgtctcttc tgtgcagaaa ttcagggcaa gcctactttg |
| 361 | cagcttaagc ttcagggctc ccaagataac atagggaagg acacttgctg gaaactagtt |
| 421 | ggaattcaca catgcataaa cctggatgtg agagagagct gcttcatggg aacccttgac |
| 481 | caatggggaa taggagtggg tagaaagaag tggaagagtt cctttcaaca tcaccatctc |
| 541 | aggaagaagg acaaagattt ctcatccatg cggaccaaca taggaatgcc aggaaggatg |
| 601 | tagaaataag gggaggaaga ttcccatctc tacaatcttt gagtgggttt gctatcaatg |
| 661 | aaatgctaca aatggaataa gttgcagaaa tttttctctt ttcttgggtt ctggagagtt |
| 721 | tgtaaaacaa ggacactatg tatttttaaa gagttggtaa atcttacctg taaagctaga |
| 781 | gaaggtcgga gtctttttag gagtagattt ggactacata acctgtaaat gtgttttgtc |
| 841 | cagtccttag agtgtttttt aaaaaattgt aaagtcaagg ttttcatgaa aaatgggaag |
| 901 | atcagacaac attgctcctg aattcccaca gagcagcaag ctactagagc tcaatctgtt |
| 961 | atttcttttc ctgatgtaca ggggttaagt cctatggaag aaacagcaga attattcaaa |
| 1021 | attatttaca taatgtgcaa ttattcacta gagcatgagg agtgaaacgc tctgtttagt |
| 1081 | atgtataact taaaaggaac acatacaatt aaaagtaatt gaaagacatt tcttcttaaa |
| 1141 | aattctataa tcttacactg gtaaaataaa ctagtttttc ccatgt |
| Human IL-36β mRNA Variant 2 | |
| (SEQ ID NO: 91) | |
| 1 | cacgggttcc tccccactct gtctttctca cctctccttc acttttccta gcctcctcac |
| 61 | caccatctga tctatcttgt tctcttcaca aaaggctctg aagacatcat gaacccacaa |
| 121 | cgggaggcag cacccaaatc ctatgctatt cgtgattctc gacagatggt gtgggtcctg |
| 181 | agtggaaatt ctttaatagc agctcctctt agccgcagca ttaagcctgt cactcttcat |
| 241 | ttaatagcct gtagagacac agaattcagt gacaaggaaa agggtaatat ggtttacctg |
| 301 | ggaatcaagg gaaaagatct ctgtctcttc tgtgcagaaa ttcagggcaa gcctactttg |
| 361 | cagcttaagg aaaaaaatat catggacctg tatgtggaga agaaagcaca gaagcccttt |
| 421 | ctctttttcc acaataaaga aggctccact tctgtctttc agtcagtctc ttaccctggc |
| 481 | tggttcatag ccacctccac cacatcagga cagcccatct ttctcaccaa ggagagaggc |
| 541 | ataactaata acactaactt ctacttagat tctgtggaat aaatccagcc taggctgtgg |
| 601 | gtggctggtt ccaggataga gaatcaagct gtcagagtca tcttaacaga tcattatgcg |
| 661 | actgagttca ctagcagttc agcccatcca tagcttacct cattcttact atccaaaagc |
| 721 | cacctcctcc tccaaacatc catttctgta ccaagaccct cactcgaatg tcactatccc |
| 781 | aagatgaaac ctaaaaatca ctttccattc tttcttgatc ttaccccacc atccactcag |
| 841 | ctgccatgcc cagtttagtc aaccccccaa atgctgcttc atgcaacctt ccattcctat |
| 901 | tccttttgcc aacccatgat gtagagatgt ggattcatga cattttgttc atacaacttc |
| 961 | ttcaataaaa cattataata tgtgccccaa agataaagct gaagaatgag atgaatgtga |
| 1021 | aattaaaggt ttgcatgtct ttctaatcct aaaaaaaaaa aaaaaaaa |
| Human IL-36γ mRNA Variant 1 | |
| (SEQ ID NO: 92) | |
| 1 | gaagctgctg gagccacgat tcagtcccct ggactgtaga taaagaccct ttcttgccag |
| 61 | gtgctgagac aaccacacta tgagaggcac tccaggagac gctgatggtg gaggaagggc |
| 121 | cgtctatcaa tcaatgtgta aacctattac tgggactatt aatgatttga atcagcaagt |
| 181 | gtggaccctt cagggtcaga accttgtggc agttccacga agtgacagtg tgaccccagt |
| 241 | cactgttgct gttatcacat gcaagtatcc agaggctctt gagcaaggca gaggggatcc |
| 301 | catttatttg ggaatccaga atccagaaat gtgtttgtat tgtgagaagg ttggagaaca |
| 361 | gcccacattg cagctaaaag agcagaagat catggatctg tatggccaac ccgagcccgt |
| 421 | gaaacccttc cttttctacc gtgccaagac tggtaggacc tccacccttg agtctgtggc |
| 481 | cttcccggac tggttcattg cctcctccaa gagagaccag cccatcattc tgacttcaga |
| 541 | acttgggaag tcatacaaca ctgcctttga attaaatata aatgactgaa ctcagcctag |
| 601 | aggtggcagc ttggtctttg tcttaaagtt tctggttccc aatgtgtttt cgtctacatt |
| 661 | ttcttagtgt cattttcacg ctggtgctga gacaggggca aggctgctgt tatcatctca |
| 721 | ttttataatg aagaagaagc aattacttca tagcaactga agaacaggat gtggcctcag |
| 781 | aagcaggaga gctgggtggt ataaggctgt cctctcaagc tggtgctgtg taggccacaa |
| 841 | ggcatctgca tgagtgactt taagactcaa agaccaaaca ctgagctttc ttctaggggt |
| 901 | gggtatgaag atgcttcaga gctcatgcgc gttacccacg atggcatgac tagcacagag |
| 961 | ctgatctctg tttctgtttt gctttattcc ctcttgggat gatatcatcc agtctttata |
| 1021 | tgttgccaat atacctcatt gtgtgtaata gaaccttctt agcattaaga ccttgtaaac |
| 1081 | aaaaataatt cttgtgttaa gttaaatcat ttttgtccta attgtaatgt gtaatcttaa |
| 1141 | agttaaataa actttgtgta tttatataat aataaagcta aaactgatat aaaataaaga |
| 1201 | aagagtaaac tg |
| Human IL-36γ mRNA Variant 2 | |
| (SEQ ID NO: 93) | |
| 1 | gaagctgctg gagccacgat tcagtcccct ggactgtaga taaagaccct ttcttgccag |
| 61 | gtgctgagac aaccacacta tgagaggcac tccaggagac gctgatggtg gaggaagggc |
| 121 | cgtctatcaa tcaatcactg ttgctgttat cacatgcaag tatccagagg ctcttgagca |
| 181 | aggcagaggg gatcccattt atttgggaat ccagaatcca gaaatgtgtt tgtattgtga |
| 241 | gaaggttgga gaacagccca cattgcagct aaaagagcag aagatcatgg atctgtatgg |
| 301 | ccaacccgag cccgtgaaac ccttcctttt ctaccgtgcc aagactggta ggacctccac |
| 361 | ccttgagtct gtggccttcc cggactggtt cattgcctcc tccaagagag accagcccat |
| 421 | cattctgact tcagaacttg ggaagtcata caacactgcc tttgaattaa atataaatga |
| 481 | ctgaactcag cctagaggtg gcagcttggt ctttgtctta aagtttctgg ttcccaatgt |
| 541 | gttttcgtct acattttctt agtgtcattt tcacgctggt gctgagacag gggcaaggct |
| 601 | gctgttatca tctcatttta taatgaagaa gaagcaatta cttcatagca actgaagaac |
| 661 | aggatgtggc ctcagaagca ggagagctgg gtggtataag gctgtcctct caagctggtg |
| 721 | ctgtgtaggc cacaaggcat ctgcatgagt gactttaaga ctcaaagacc aaacactgag |
| 781 | ctttcttcta ggggtgggta tgaagatgct tcagagctca tgcgcgttac ccacgatggc |
| 841 | atgactagca cagagctgat ctctgtttct gttttgcttt attccctctt gggatgatat |
| 901 | catccagtct ttatatgttg ccaatatacc tcattgtgtg taatagaacc ttcttagcat |
| 961 | taagaccttg taaacaaaaa taattcttgt gttaagttaa atcatttttg tcctaattgt |
| 1021 | aatgtgtaat cttaaagtta aataaacttt gtgtatttat ataataataa agctaaaact |
| 1081 | gatataaaat aaagaaagag taaactg |
| Human IL-38 mRNA Variant 1 | |
| (SEQ ID NO: 94) | |
| 1 | ggcagtggga ctgggtttga gctgggctta tcctccaact gtgagggagg ctacagcaca |
| 61 | ctccacccca ctctcagggc tgggaattgt tgtggctcag ctatttgggg gaatctgttt |
| 121 | tccagtttct cagaaccagc gcaagcacac acatcccagg ctcacacccc tggtggctgg |
| 181 | acttgctccc ggatagcctc agtcagggag aggcagagct gcctggagcc tgctgggctg |
| 241 | gtggaagcct tggtggattc tggcaggcca attatagacg aatggcctgg ggaacccgtg |
| 301 | cagcccttgg ctgagtggtt ctaagcccca gcacgtctgc ctctggcttc acccagcctc |
| 361 | cttttctaac tgcccttctc tcctccccat cagtgaggac cagacaccac tgattgcagg |
| 421 | aatgtgttcc ctccccatgg caagatacta cataattaaa tatgcagacc agaaggctct |
| 481 | atacacaaga gatggccagc tgctggtggg agatcctgtt gcagacaact gctgtgcaga |
| 541 | gaagatctgc atacttccta acagaggctt ggcccgcacc aaggtcccca ttttcctggg |
| 601 | gatccaggga gggagccgct gcctggcatg tgtggagaca gaagaggggc cttccctaca |
| 661 | gctggaggat gtgaacattg aggaactgta caaaggtggt gaagaggcca cacgcttcac |
| 721 | cttcttccag agcagctcag gctccgcctt caggcttgag gctgctgcct ggcctggctg |
| 781 | gttcctgtgt ggcccggcag agccccagca gccagtacag ctcaccaagg agagtgagcc |
| 841 | ctcagcccgt accaagtttt actttgaaca gagctggtag ggagacagga aactgcgttt |
| 901 | tagccttgtg cccccaaacc aagctcatcc tgctcagggt ctatggtagg cagaataatg |
| 961 | tcccccgaaa tatgtccaca tcctaatccc aagatctgtg catatgttac catacatgtc |
| 1021 | caaagaggtt ttgcaaatgt gattatgtta aggatcttga aatgaggaga caatcctggg |
| 1081 | ttatccttgt gggctcagtt taatcacaag aaggaggcag gaagggagag tcagagagag |
| 1141 | aatggaagat accatgcttc taattttgaa gatggagtga ggggccttga gccaacaaat |
| 1201 | gcaggtgttt ttagaaggtg gaaaagccaa gggaacggat tctcctctag agtctccgga |
| 1261 | aggaacacag ctcttgacac atggatttca gctcagtgac acccatttca gacttctgac |
| 1321 | ctccacaact ataaaataat aaacttgtgt tattgtaaac ctctaa |
| Human IL-38 mRNA Variant 2 | |
| (SEQ ID NO: 95) | |
| 1 | agttggagtc tccagggatc agggttccag gaactcagga tctgcagtga ggaccagaca |
| 61 | ccactgattg caggaatgtg ttccctcccc atggcaagat actacataat taaatatgca |
| 121 | gaccagaagg ctctatacac aagagatggc cagctgctgg tgggagatcc tgttgcagac |
| 181 | aactgctgtg cagagaagat ctgcatactt cctaacagag gcttggcccg caccaaggtc |
| 241 | cccattttcc tggggatcca gggagggagc cgctgcctgg catgtgtgga gacagaagag |
| 301 | gggccttccc tacagctgga ggatgtgaac attgaggaac tgtacaaagg tggtgaagag |
| 361 | gccacacgct tcaccttctt ccagagcagc tcaggctccg ccttcaggct tgaggctgct |
| 421 | gcctggcctg gctggttcct gtgtggcccg gcagagcccc agcagccagt acagctcacc |
| 481 | aaggagagtg agccctcagc ccgtaccaag ttttactttg aacagagctg gtagggagac |
| 541 | aggaaactgc gttttagcct tgtgccccca aaccaagctc atcctgctca gggtctatgg |
| 601 | taggcagaat aatgtccccc gaaatatgtc cacatcctaa tcccaagatc tgtgcatatg |
| 661 | ttaccataca tgtccaaaga ggttttgcaa atgtgattat gttaaggatc ttgaaatgag |
| 721 | gagacaatcc tgggttatcc ttgtgggctc agtttaatca caagaaggag gcaggaaggg |
| 781 | agagtcagag agagaatgga agataccatg cttctaattt tgaagatgga gtgaggggcc |
| 841 | ttgagccaac aaatgcaggt gtttttagaa ggtggaaaag ccaagggaac ggattctcct |
| 901 | ctagagtctc cggaaggaac acagctcttg acacatggat ttcagctcag tgacacccat |
| 961 | ttcagacttc tgacctccac aactataaaa taataaactt gtgttattgt aaacctctaa |
| 1021 | aaaaaaa |
| Human IL-33 mRNA Variant 1 | |
| (SEQ ID NO: 96) | |
| 1 | agtctacaga ctcctccgaa cacagagctg cagctcttca gggaagaaat caaaacaaga |
| 61 | tcacaagaat actgaaaaat gaagcctaaa atgaagtatt caaccaacaa aatttccaca |
| 121 | gcaaagtgga agaacacagc aagcaaagcc ttgtgtttca agctgggaaa atcccaacag |
| 181 | aaggccaaag aagtttgccc catgtacttt atgaagctcc gctctggcct tatgataaaa |
| 241 | aaggaggcct gttactttag gagagaaacc accaaaaggc cttcactgaa aacaggtaga |
| 301 | aagcacaaaa gacatctggt actcgctgcc tgtcaacagc agtctactgt ggagtgcttt |
| 361 | gcctttggta tatcaggggt ccagaaatat actagagcac ttcatgattc aagtatcaca |
| 421 | ggaatttcac ctattacaga gtatcttgct tctctaagca catacaatga tcaatccatt |
| 481 | acttttgctt tggaggatga aagttatgag atatatgttg aagacttgaa aaaagatgaa |
| 541 | aagaaagata aggtgttact gagttactat gagtctcaac acccctcaaa tgaatcaggt |
| 601 | gacggtgttg atggtaagat gttaatggta accctgagtc ctacaaaaga cttctggttg |
| 661 | catgccaaca acaaggaaca ctctgtggag ctccataagt gtgaaaaacc actgccagac |
| 721 | caggccttct ttgtccttca taatatgcac tccaactgtg tttcatttga atgcaagact |
| 781 | gatcctggag tgtttatagg tgtaaaggat aatcatcttg ctctgattaa agtagactct |
| 841 | tctgagaatt tgtgtactga aaatatcttg tttaagctct ctgaaactta gttgatggaa |
| 901 | acctgtgagt cttgggttga gtacccaaat gctaccactg gagaaggaat gagagataaa |
| 961 | gaaagagaca ggtgacatct aagggaaatg aagagtgctt agcatgtgtg gaatgttttc |
| 1021 | catattatgt ataaaaatat tttttctaat cctccagtta ttcttttatt tccctctgta |
| 1081 | taactgcatc ttcaatacaa gtatcagtat attaaatagg gtattggtaa agaaacggtc |
| 1141 | aacattctaa agagatacag tctgaccttt acttttctct agtttcagtc cagaaagaac |
| 1201 | ttcatattta gagctaaggc cactgaggaa agagccatag cttaagtctc tatgtagaca |
| 1261 | gggatccatt ttaaagagct acttagagaa ataattttcc acagttccaa acgataggct |
| 1321 | caaacactag agctgctagt aaaaagaaga ccagatgctt cacagaatta tcattttttc |
| 1381 | aactggaata aaacaccagg tttgtttgta gatgtcttag gcaacactca gagcagatct |
| 1441 | cccttactgt caggggatat ggaacttcaa aggcccacat ggcaagccag gtaacataaa |
| 1501 | tgtgtgaaaa agtaaagata actaaaaaat ttagaaaaat aaatccagta tttgtaaagt |
| 1561 | gaataacttc atttctaatt gtttaatttt taaaattctg atttttatat attgagttta |
| 1621 | agcaaggcat tcttacacga ggaagtgaag taaattttag ttcagacata aaatttcact |
| 1681 | tattaggaat atgtaacatg ctaaaacttt ttttttttta aagagtactg agtcacaaca |
| 1741 | tgttttagag catccaagta ccatataatc caactatcat ggtaaggcca gaaatcttct |
| 1801 | aacctaccag agcctagatg agacaccgaa ttaacattaa aatttcagta actgactgtc |
| 1861 | cctcatgtcc atggcctacc atcccttctg accctggctt ccagggacct atgtctttta |
| 1921 | atactcactg tcacattggg caaagttgct tctaatcctt atttcccatg tgcacaagtc |
| 1981 | tttttgtatt ccagcttcct gataacactg cttactgtgg aatattcatt tgacatctgt |
| 2041 | ctcttttcat ttcttttaac taccatgccc ttgatatatc ttttgcacct gctgaacttc |
| 2101 | atttctgtat cacctgacct ctggatgcca aaacgtttat tctgctttgt ctgttgtaga |
| 2161 | attttagata aagctattaa tggcaatatt tttttgctaa acgtttttgt tttttactgt |
| 2221 | cactagggca ataaaattta tactcaacca tataataaca ttttttaact actaaaggag |
| 2281 | tagtttttat tttaaagtct tagcaatttc tattacaact tttcttagac ttaacactta |
| 2341 | tgataaatga ctaacatagt aacagaatct ttatgaaata tgaccttttc tgaaaataca |
| 2401 | tacttttaca tttctacttt attgagacct attagatgta agtgctagta gaatataaga |
| 2461 | taaaagaggc tgagaattac catacaaggg tattacaact gtaaaacaat ttatctttgt |
| 2521 | ttcattgttc tgtcaataat tgttaccaaa gagataaaaa taaaagcaga atgtatatca |
| 2581 | tcccatctga aaaacactaa ttattgacat gtgcatctgt acaataaact taaaatgatt |
| 2641 | attaaataat caaatatatc tactacattg tttatattat tgaataaagt atattttcca |
| 2701 | aatgtaaaaa aaaaaaaa |
| Human IL-33 mRNA Variant 2 | |
| (SEQ ID NO: 97) | |
| 1 | agtctacaga ctcctccgaa cacagagctg cagctcttca gggaagaaat caaaacaaga |
| 61 | tcacaagaat actgaaaaat gaagcctaaa atgaagtatt caaccaacaa aatttccaca |
| 121 | gcaaagtgga agaacacagc aagcaaagcc ttgtgtttca agctgggaaa atcccaacag |
| 181 | aaggccaaag aagtttgccc catgtacttt atgaagctcc gctctggcct tatgataaaa |
| 241 | aaggaggcct gttactttag gagagaaacc accaaaaggc cttcactgaa aacaggtaga |
| 301 | aagcacaaaa gacatctggt actcgctgcc tgtcaacagc agtctactgt ggagtgcttt |
| 361 | gcctttggta tatcaggggt ccagaaatat actagagcac ttcatgattc aagtatcaca |
| 421 | gataaggtgt tactgagtta ctatgagtct caacacccct caaatgaatc aggtgacggt |
| 481 | gttgatggta agatgttaat ggtaaccctg agtcctacaa aagacttctg gttgcatgcc |
| 541 | aacaacaagg aacactctgt ggagctccat aagtgtgaaa aaccactgcc agaccaggcc |
| 601 | ttctttgtcc ttcataatat gcactccaac tgtgtttcat ttgaatgcaa gactgatcct |
| 661 | ggagtgttta taggtgtaaa ggataatcat cttgctctga ttaaagtaga ctcttctgag |
| 721 | aatttgtgta ctgaaaatat cttgtttaag ctctctgaaa cttagttgat ggaaacctgt |
| 781 | gagtcttggg ttgagtaccc aaatgctacc actggagaag gaatgagaga taaagaaaga |
| 841 | gacaggtgac atctaaggga aatgaagagt gcttagcatg tgtggaatgt tttccatatt |
| 901 | atgtataaaa atattttttc taatcctcca gttattcttt tatttccctc tgtataactg |
| 961 | catcttcaat acaagtatca gtatattaaa tagggtattg gtaaagaaac ggtcaacatt |
| 1021 | ctaaagagat acagtctgac ctttactttt ctctagtttc agtccagaaa gaacttcata |
| 1081 | tttagagcta aggccactga ggaaagagcc atagcttaag tctctatgta gacagggatc |
| 1141 | cattttaaag agctacttag agaaataatt ttccacagtt ccaaacgata ggctcaaaca |
| 1201 | ctagagctgc tagtaaaaag aagaccagat gcttcacaga attatcattt tttcaactgg |
| 1261 | aataaaacac caggtttgtt tgtagatgtc ttaggcaaca ctcagagcag atctccctta |
| 1321 | ctgtcagggg atatggaact tcaaaggccc acatggcaag ccaggtaaca taaatgtgtg |
| 1381 | aaaaagtaaa gataactaaa aaatttagaa aaataaatcc agtatttgta aagtgaataa |
| 1441 | cttcatttct aattgtttaa tttttaaaat tctgattttt atatattgag tttaagcaag |
| 1501 | gcattcttac acgaggaagt gaagtaaatt ttagttcaga cataaaattt cacttattag |
| 1561 | gaatatgtaa catgctaaaa cttttttttt tttaaagagt actgagtcac aacatgtttt |
| 1621 | agagcatcca agtaccatat aatccaacta tcatggtaag gccagaaatc ttctaaccta |
| 1681 | ccagagccta gatgagacac cgaattaaca ttaaaatttc agtaactgac tgtccctcat |
| 1741 | gtccatggcc taccatccct tctgaccctg gcttccaggg acctatgtct tttaatactc |
| 1801 | actgtcacat tgggcaaagt tgcttctaat ccttatttcc catgtgcaca agtctttttg |
| 1861 | tattccagct tcctgataac actgcttact gtggaatatt catttgacat ctgtctcttt |
| 1921 | tcatttcttt taactaccat gcccttgata tatcttttgc acctgctgaa cttcatttct |
| 1981 | gtatcacctg acctctggat gccaaaacgt ttattctgct ttgtctgttg tagaatttta |
| 2041 | gataaagcta ttaatggcaa tatttttttg ctaaacgttt ttgtttttta ctgtcactag |
| 2101 | ggcaataaaa tttatactca accatataat aacatttttt aactactaaa ggagtagttt |
| 2161 | ttattttaaa gtcttagcaa tttctattac aacttttctt agacttaaca cttatgataa |
| 2221 | atgactaaca tagtaacaga atctttatga aatatgacct tttctgaaaa tacatacttt |
| 2281 | tacatttcta ctttattgag acctattaga tgtaagtgct agtagaatat aagataaaag |
| 2341 | aggctgagaa ttaccataca agggtattac aactgtaaaa caatttatct ttgtttcatt |
| 2401 | gttctgtcaa taattgttac caaagagata aaaataaaag cagaatgtat atcatcccat |
| 2461 | ctgaaaaaca ctaattattg acatgtgcat ctgtacaata aacttaaaat gattattaaa |
| 2521 | taatcaaata tatctactac attgtttata ttattgaata aagtatattt tccaaatgta |
| 2581 | aaaaaaaaaa aa |
| Human IL-33 mRNA Variant 3 | |
| (SEQ ID NO: 98) | |
| 1 | agtctacaga ctcctccgaa cacagagctg cagctcttca gggaagaaat caaaacaaga |
| 61 | tcacaagaat actgaaaaat gaagcctaaa atgaagtatt caaccaacaa aatttccaca |
| 121 | gcaaagtgga agaacacagc aagcaaagcc ttgtgtttca agctgggaaa taaggtgtta |
| 181 | ctgagttact atgagtctca acacccctca aatgaatcag gtgacggtgt tgatggtaag |
| 241 | atgttaatgg taaccctgag tcctacaaaa gacttctggt tgcatgccaa caacaaggaa |
| 301 | cactctgtgg agctccataa gtgtgaaaaa ccactgccag accaggcctt ctttgtcctt |
| 361 | cataatatgc actccaactg tgtttcattt gaatgcaaga ctgatcctgg agtgtttata |
| 421 | ggtgtaaagg ataatcatct tgctctgatt aaagtagact cttctgagaa tttgtgtact |
| 481 | gaaaatatct tgtttaagct ctctgaaact tagttgatgg aaacctgtga gtcttgggtt |
| 541 | gagtacccaa atgctaccac tggagaagga atgagagata aagaaagaga caggtgacat |
| 601 | ctaagggaaa tgaagagtgc ttagcatgtg tggaatgttt tccatattat gtataaaaat |
| 661 | attttttcta atcctccagt tattctttta tttccctctg tataactgca tcttcaatac |
| 721 | aagtatcagt atattaaata gggtattggt aaagaaacgg tcaacattct aaagagatac |
| 781 | agtctgacct ttacttttct ctagtttcag tccagaaaga acttcatatt tagagctaag |
| 841 | gccactgagg aaagagccat agcttaagtc tctatgtaga cagggatcca ttttaaagag |
| 901 | ctacttagag aaataatttt ccacagttcc aaacgatagg ctcaaacact agagctgcta |
| 961 | gtaaaaagaa gaccagatgc ttcacagaat tatcattttt tcaactggaa taaaacacca |
| 1021 | ggtttgtttg tagatgtctt aggcaacact cagagcagat ctcccttact gtcaggggat |
| 1081 | atggaacttc aaaggcccac atggcaagcc aggtaacata aatgtgtgaa aaagtaaaga |
| 1141 | taactaaaaa atttagaaaa ataaatccag tatttgtaaa gtgaataact tcatttctaa |
| 1201 | ttgtttaatt tttaaaattc tgatttttat atattgagtt taagcaaggc attcttacac |
| 1261 | gaggaagtga agtaaatttt agttcagaca taaaatttca cttattagga atatgtaaca |
| 1321 | tgctaaaact tttttttttt taaagagtac tgagtcacaa catgttttag agcatccaag |
| 1381 | taccatataa tccaactatc atggtaaggc cagaaatctt ctaacctacc agagcctaga |
| 1441 | tgagacaccg aattaacatt aaaatttcag taactgactg tccctcatgt ccatggccta |
| 1501 | ccatcccttc tgaccctggc ttccagggac ctatgtcttt taatactcac tgtcacattg |
| 1561 | ggcaaagttg cttctaatcc ttatttccca tgtgcacaag tctttttgta ttccagcttc |
| 1621 | ctgataacac tgcttactgt ggaatattca tttgacatct gtctcttttc atttctttta |
| 1681 | actaccatgc ccttgatata tcttttgcac ctgctgaact tcatttctgt atcacctgac |
| 1741 | ctctggatgc caaaacgttt attctgcttt gtctgttgta gaattttaga taaagctatt |
| 1801 | aatggcaata tttttttgct aaacgttttt gttttttact gtcactaggg caataaaatt |
| 1861 | tatactcaac catataataa cattttttaa ctactaaagg agtagttttt attttaaagt |
| 1921 | cttagcaatt tctattacaa cttttcttag acttaacact tatgataaat gactaacata |
| 1981 | gtaacagaat ctttatgaaa tatgaccttt tctgaaaata catactttta catttctact |
| 2041 | ttattgagac ctattagatg taagtgctag tagaatataa gataaaagag gctgagaatt |
| 2101 | accatacaag ggtattacaa ctgtaaaaca atttatcttt gtttcattgt tctgtcaata |
| 2161 | attgttacca aagagataaa aataaaagca gaatgtatat catcccatct gaaaaacact |
| 2221 | aattattgac atgtgcatct gtacaataaa cttaaaatga ttattaaata atcaaatata |
| 2281 | tctactacat tgtttatatt attgaataaa gtatattttc caaatgtaaa aaaaaaaaaa |
| Human IL-33 mRNA Variant 4 | |
| (SEQ ID NO: 99) | |
| 1 | acagatgcca aacgagatgg agagagggtg agtaggagca aaatttctca tgagaatact |
| 61 | gaaaaatgaa gcctaaaatg aagtattcaa ccaacaaaat ttccacagca aagtggaaga |
| 121 | acacagcaag caaagccttg tgtttcaagc tgggaaaatc ccaacagaag gccaaagaag |
| 181 | tttgccccat gtactttatg aagctccgct ctggccttat gataaaaaag gaggcctgtt |
| 241 | actttaggag agaaaccacc aaaaggcctt cactgaaaac aggtagaaag cacaaaagac |
| 301 | atctggtact cgctgcctgt caacagcagt ctactgtgga gtgctttgcc tttggtatat |
| 361 | caggggtcca gaaatatact agagcacttc atgattcaag tatcacagga atttcaccta |
| 421 | ttacagagta tcttgcttct ctaagcacat acaatgatca atccattact tttgctttgg |
| 481 | aggatgaaag ttatgagata tatgttgaag acttgaaaaa agatgaaaag aaagataagg |
| 541 | tgttactgag ttactatgag tctcaacacc cctcaaatga atcaggtgac ggtgttgatg |
| 601 | gtaagatgtt aatggtaacc ctgagtccta caaaagactt ctggttgcat gccaacaaca |
| 661 | aggaacactc tgtggagctc cataagtgtg aaaaaccact gccagaccag gccttctttg |
| 721 | tccttcataa tatgcactcc aactgtgttt catttgaatg caagactgat cctggagtgt |
| 781 | ttataggtgt aaaggataat catcttgctc tgattaaagt agactcttct gagaatttgt |
| 841 | gtactgaaaa tatcttgttt aagctctctg aaacttagtt gatggaaacc tgtgagtctt |
| 901 | gggttgagta cccaaatgct accactggag aaggaatgag agataaagaa agagacaggt |
| 961 | gacatctaag ggaaatgaag agtgcttagc atgtgtggaa tgttttccat attatgtata |
| 1021 | aaaatatttt ttctaatcct ccagttattc ttttatttcc ctctgtataa ctgcatcttc |
| 1081 | aatacaagta tcagtatatt aaatagggta ttggtaaaga aacggtcaac attctaaaga |
| 1141 | gatacagtct gacctttact tttctctagt ttcagtccag aaagaacttc atatttagag |
| 1201 | ctaaggccac tgaggaaaga gccatagctt aagtctctat gtagacaggg atccatttta |
| 1261 | aagagctact tagagaaata attttccaca gttccaaacg ataggctcaa acactagagc |
| 1321 | tgctagtaaa aagaagacca gatgcttcac agaattatca ttttttcaac tggaataaaa |
| 1381 | caccaggttt gtttgtagat gtcttaggca acactcagag cagatctccc ttactgtcag |
| 1441 | gggatatgga acttcaaagg cccacatggc aagccaggta acataaatgt gtgaaaaagt |
| 1501 | aaagataact aaaaaattta gaaaaataaa tccagtattt gtaaagtgaa taacttcatt |
| 1561 | tctaattgtt taatttttaa aattctgatt tttatatatt gagtttaagc aaggcattct |
| 1621 | tacacgagga agtgaagtaa attttagttc agacataaaa tttcacttat taggaatatg |
| 1681 | taacatgcta aaactttttt ttttttaaag agtactgagt cacaacatgt tttagagcat |
| 1741 | ccaagtacca tataatccaa ctatcatggt aaggccagaa atcttctaac ctaccagagc |
| 1801 | ctagatgaga caccgaatta acattaaaat ttcagtaact gactgtccct catgtccatg |
| 1861 | gcctaccatc ccttctgacc ctggcttcca gggacctatg tcttttaata ctcactgtca |
| 1921 | cattgggcaa agttgcttct aatccttatt tcccatgtgc acaagtcttt ttgtattcca |
| 1981 | gcttcctgat aacactgctt actgtggaat attcatttga catctgtctc ttttcatttc |
| 2041 | ttttaactac catgcccttg atatatcttt tgcacctgct gaacttcatt tctgtatcac |
| 2101 | ctgacctctg gatgccaaaa cgtttattct gctttgtctg ttgtagaatt ttagataaag |
| 2161 | ctattaatgg caatattttt ttgctaaacg tttttgtttt ttactgtcac tagggcaata |
| 2221 | aaatttatac tcaaccatat aataacattt tttaactact aaaggagtag tttttatttt |
| 2281 | aaagtcttag caatttctat tacaactttt cttagactta acacttatga taaatgacta |
| 2341 | acatagtaac agaatcttta tgaaatatga ccttttctga aaatacatac ttttacattt |
| 2401 | ctactttatt gagacctatt agatgtaagt gctagtagaa tataagataa aagaggctga |
| 2461 | gaattaccat acaagggtat tacaactgta aaacaattta tctttgtttc attgttctgt |
| 2521 | caataattgt taccaaagag ataaaaataa aagcagaatg tatatcatcc catctgaaaa |
| 2581 | acactaatta ttgacatgtg catctgtaca ataaacttaa aatgattatt aaataatcaa |
| 2641 | atatatctac tacattgttt atattattga ataaagtata ttttccaaat gtaaaaaaaa |
| 2701 | aaaaa |
| Human IL-33 mRNA Variant 5 | |
| (SEQ ID NO: 100) | |
| 1 | aaatactaca attgctgact acaggaaacc tcatcatctg agaccagcac tttataaatt |
| 61 | agaatactga aaaatgaagc ctaaaatgaa gtattcaacc aacaaaattt ccacagcaaa |
| 121 | gtggaagaac acagcaagca aagccttgtg tttcaagctg ggaaaatccc aacagaaggc |
| 181 | caaagaagtt tgccccatgt actttatgaa gctccgctct ggccttatga taaaaaagga |
| 241 | ggcctgttac tttaggagag aaaccaccaa aaggccttca ctgaaaacag gtagaaagca |
| 301 | caaaagacat ctggtactcg ctgcctgtca acagcagtct actgtggagt gctttgcctt |
| 361 | tggtatatca ggggtccaga aatatactag agcacttcat gattcaagta tcacaggaat |
| 421 | ttcacctatt acagagtatc ttgcttctct aagcacatac aatgatcaat ccattacttt |
| 481 | tgctttggag gatgaaagtt atgagatata tgttgaagac ttgaaaaaag atgaaaagaa |
| 541 | agataaggtg ttactgagtt actatgagtc tcaacacccc tcaaatgaat caggtgacgg |
| 601 | tgttgatggt aagatgttaa tggtaaccct gagtcctaca aaagacttct ggttgcatgc |
| 661 | caacaacaag gaacactctg tggagctcca taagtgtgaa aaaccactgc cagaccaggc |
| 721 | cttctttgtc cttcataata tgcactccaa ctgtgtttca tttgaatgca agactgatcc |
| 781 | tggagtgttt ataggtgtaa aggataatca tcttgctctg attaaagtag actcttctga |
| 841 | gaatttgtgt actgaaaata tcttgtttaa gctctctgaa acttagttga tggaaacctg |
| 901 | tgagtcttgg gttgagtacc caaatgctac cactggagaa ggaatgagag ataaagaaag |
| 961 | agacaggtga catctaaggg aaatgaagag tgcttagcat gtgtggaatg ttttccatat |
| 1021 | tatgtataaa aatatttttt ctaatcctcc agttattctt ttatttccct ctgtataact |
| 1081 | gcatcttcaa tacaagtatc agtatattaa atagggtatt ggtaaagaaa cggtcaacat |
| 1141 | tctaaagaga tacagtctga cctttacttt tctctagttt cagtccagaa agaacttcat |
| 1201 | atttagagct aaggccactg aggaaagagc catagcttaa gtctctatgt agacagggat |
| 1261 | ccattttaaa gagctactta gagaaataat tttccacagt tccaaacgat aggctcaaac |
| 1321 | actagagctg ctagtaaaaa gaagaccaga tgcttcacag aattatcatt ttttcaactg |
| 1381 | gaataaaaca ccaggtttgt ttgtagatgt cttaggcaac actcagagca gatctccctt |
| 1441 | actgtcaggg gatatggaac ttcaaaggcc cacatggcaa gccaggtaac ataaatgtgt |
| 1501 | gaaaaagtaa agataactaa aaaatttaga aaaataaatc cagtatttgt aaagtgaata |
| 1561 | acttcatttc taattgttta atttttaaaa ttctgatttt tatatattga gtttaagcaa |
| 1621 | ggcattctta cacgaggaag tgaagtaaat tttagttcag acataaaatt tcacttatta |
| 1681 | ggaatatgta acatgctaaa actttttttt ttttaaagag tactgagtca caacatgttt |
| 1741 | tagagcatcc aagtaccata taatccaact atcatggtaa ggccagaaat cttctaacct |
| 1801 | accagagcct agatgagaca ccgaattaac attaaaattt cagtaactga ctgtccctca |
| 1861 | tgtccatggc ctaccatccc ttctgaccct ggcttccagg gacctatgtc ttttaatact |
| 1921 | cactgtcaca ttgggcaaag ttgcttctaa tccttatttc ccatgtgcac aagtcttttt |
| 1981 | gtattccagc ttcctgataa cactgcttac tgtggaatat tcatttgaca tctgtctctt |
| 2041 | ttcatttctt ttaactacca tgcccttgat atatcttttg cacctgctga acttcatttc |
| 2101 | tgtatcacct gacctctgga tgccaaaacg tttattctgc tttgtctgtt gtagaatttt |
| 2161 | agataaagct attaatggca atattttttt gctaaacgtt tttgtttttt actgtcacta |
| 2221 | gggcaataaa atttatactc aaccatataa taacattttt taactactaa aggagtagtt |
| 2281 | tttattttaa agtcttagca atttctatta caacttttct tagacttaac acttatgata |
| 2341 | aatgactaac atagtaacag aatctttatg aaatatgacc ttttctgaaa atacatactt |
| 2401 | ttacatttct actttattga gacctattag atgtaagtgc tagtagaata taagataaaa |
| 2461 | gaggctgaga attaccatac aagggtatta caactgtaaa acaatttatc tttgtttcat |
| 2521 | tgttctgtca ataattgtta ccaaagagat aaaaataaaa gcagaatgta tatcatccca |
| 2581 | tctgaaaaac actaattatt gacatgtgca tctgtacaat aaacttaaaa tgattattaa |
| 2641 | ataatcaaat atatctacta cattgtttat attattgaat aaagtatatt ttccaaatgt |
| 2701 | aaaaaaaaaa aaa |
| Human IL-33 mRNA Variant 6 | |
| (SEQ ID NO: 101) | |
| 1 | agtctacaga ctcctccgaa cacagagctg cagctcttca gggaagaaat caaaacaaga |
| 61 | tcacaagaat actgaaaaat gaagcctaaa atgaagtatt caaccaacaa aatttccaca |
| 121 | gcaaagtgga agaacacagc aagcaaagcc ttgtgtttca agctgggaaa atcccaacag |
| 181 | aaggccaaag aagtttgccc catgtacttt atgaagctcc gctctggcct tatgataaaa |
| 241 | aaggaggcct gttactttag gagagaaacc accaaaaggc cttcactgaa aacaggtaga |
| 301 | aagcacaaaa gacatctggt actcgctgcc tgtcaacagc agtctactgt ggagtgcttt |
| 361 | gcctttggta tatcaggggt ccagaaatat actagagcac ttcatgattc aagtatcaca |
| 421 | gagtatcttg cttctctaag cacatacaat gatcaatcca ttacttttgc tttggaggat |
| 481 | gaaagttatg agatatatgt tgaagacttg aaaaaagatg aaaagaaaga taaggtgtta |
| 541 | ctgagttact atgagtctca acacccctca aatgaatcag gtgacggtgt tgatggtaag |
| 601 | atgttaatgg taaccctgag tcctacaaaa gacttctggt tgcatgccaa caacaaggaa |
| 661 | cactctgtgg agctccataa gtgtgaaaaa ccactgccag accaggcctt ctttgtcctt |
| 721 | cataatatgc actccaactg tgtttcattt gaatgcaaga ctgatcctgg agtgtttata |
| 781 | ggtgtaaagg ataatcatct tgctctgatt aaagtagact cttctgagaa tttgtgtact |
| 841 | gaaaatatct tgtttaagct ctctgaaact tagttgatgg aaacctgtga gtcttgggtt |
| 901 | gagtacccaa atgctaccac tggagaagga atgagagata aagaaagaga caggtgacat |
| 961 | ctaagggaaa tgaagagtgc ttagcatgtg tggaatgttt tccatattat gtataaaaat |
| 1021 | attttttcta atcctccagt tattctttta tttccctctg tataactgca tcttcaatac |
| 1081 | aagtatcagt atattaaata gggtattggt aaagaaacgg tcaacattct aaagagatac |
| 1141 | agtctgacct ttacttttct ctagtttcag tccagaaaga acttcatatt tagagctaag |
| 1201 | gccactgagg aaagagccat agcttaagtc tctatgtaga cagggatcca ttttaaagag |
| 1261 | ctacttagag aaataatttt ccacagttcc aaacgatagg ctcaaacact agagctgcta |
| 1321 | gtaaaaagaa gaccagatgc ttcacagaat tatcattttt tcaactggaa taaaacacca |
| 1381 | ggtttgtttg tagatgtctt aggcaacact cagagcagat ctcccttact gtcaggggat |
| 1441 | atggaacttc aaaggcccac atggcaagcc aggtaacata aatgtgtgaa aaagtaaaga |
| 1501 | taactaaaaa atttagaaaa ataaatccag tatttgtaaa gtgaataact tcatttctaa |
| 1561 | ttgtttaatt tttaaaattc tgatttttat atattgagtt taagcaaggc attcttacac |
| 1621 | gaggaagtga agtaaatttt agttcagaca taaaatttca cttattagga atatgtaaca |
| 1681 | tgctaaaact tttttttttt taaagagtac tgagtcacaa catgttttag agcatccaag |
| 1741 | taccatataa tccaactatc atggtaaggc cagaaatctt ctaacctacc agagcctaga |
| 1801 | tgagacaccg aattaacatt aaaatttcag taactgactg tccctcatgt ccatggccta |
| 1861 | ccatcccttc tgaccctggc ttccagggac ctatgtcttt taatactcac tgtcacattg |
| 1921 | ggcaaagttg cttctaatcc ttatttccca tgtgcacaag tctttttgta ttccagcttc |
| 1981 | ctgataacac tgcttactgt ggaatattca tttgacatct gtctcttttc atttctttta |
| 2041 | actaccatgc ccttgatata tcttttgcac ctgctgaact tcatttctgt atcacctgac |
| 2101 | ctctggatgc caaaacgttt attctgcttt gtctgttgta gaattttaga taaagctatt |
| 2161 | aatggcaata tttttttgct aaacgttttt gttttttact gtcactaggg caataaaatt |
| 2221 | tatactcaac catataataa cattttttaa ctactaaagg agtagttttt attttaaagt |
| 2281 | cttagcaatt tctattacaa cttttcttag acttaacact tatgataaat gactaacata |
| 2341 | gtaacagaat ctttatgaaa tatgaccttt tctgaaaata catactttta catttctact |
| 2401 | ttattgagac ctattagatg taagtgctag tagaatataa gataaaagag gctgagaatt |
| 2461 | accatacaag ggtattacaa ctgtaaaaca atttatcttt gtttcattgt tctgtcaata |
| 2521 | attgttacca aagagataaa aataaaagca gaatgtatat catcccatct gaaaaacact |
| 2581 | aattattgac atgtgcatct gtacaataaa cttaaaatga ttattaaata atcaaatata |
| 2641 | tctactacat tgtttatatt attgaataaa gtatattttc caaatgtaaa aaaaaaaaaa |
| Human IL-33 mRNA Variant 7 | |
| (SEQ ID NO: 102) | |
| 1 | acagatgcca aacgagatgg agagagggtg agtaggagca aaatttctca tgagaatact |
| 61 | gaaaaatgaa gcctaaaatg aagtattcaa ccaacaaaat ttccacagca aagtggaaga |
| 121 | acacagcaag caaagccttg tgtttcaagc tgggaaaatc ccaacagaag gccaaagaag |
| 181 | tttgccccat gtactttatg aagctccgct ctggccttat gataaaaaag gaggcctgtt |
| 241 | actttaggag agaaaccacc aaaaggcctt cactgaaaac aggtagaaag cacaaaagac |
| 301 | atctggtact cgctgcctgt caacagcagt ctactgtgga gtgctttgcc tttggtatat |
| 361 | caggggtcca gaaatatact agagcacttc atgattcaag tatcacagag tatcttgctt |
| 421 | ctctaagcac atacaatgat caatccatta cttttgcttt ggaggatgaa agttatgaga |
| 481 | tatatgttga agacttgaaa aaagatgaaa agaaagataa ggtgttactg agttactatg |
| 541 | agtctcaaca cccctcaaat gaatcaggtg acggtgttga tggtaagatg ttaatggtaa |
| 601 | ccctgagtcc tacaaaagac ttctggttgc atgccaacaa caaggaacac tctgtggagc |
| 661 | tccataagtg tgaaaaacca ctgccagacc aggccttctt tgtccttcat aatatgcact |
| 721 | ccaactgtgt ttcatttgaa tgcaagactg atcctggagt gtttataggt gtaaaggata |
| 781 | atcatcttgc tctgattaaa gtagactctt ctgagaattt gtgtactgaa aatatcttgt |
| 841 | ttaagctctc tgaaacttag ttgatggaaa cctgtgagtc ttgggttgag tacccaaatg |
| 901 | ctaccactgg agaaggaatg agagataaag aaagagacag gtgacatcta agggaaatga |
| 961 | agagtgctta gcatgtgtgg aatgttttcc atattatgta taaaaatatt ttttctaatc |
| 1021 | ctccagttat tcttttattt ccctctgtat aactgcatct tcaatacaag tatcagtata |
| 1081 | ttaaataggg tattggtaaa gaaacggtca acattctaaa gagatacagt ctgaccttta |
| 1141 | cttttctcta gtttcagtcc agaaagaact tcatatttag agctaaggcc actgaggaaa |
| 1201 | gagccatagc ttaagtctct atgtagacag ggatccattt taaagagcta cttagagaaa |
| 1261 | taattttcca cagttccaaa cgataggctc aaacactaga gctgctagta aaaagaagac |
| 1321 | cagatgcttc acagaattat cattttttca actggaataa aacaccaggt ttgtttgtag |
| 1381 | atgtcttagg caacactcag agcagatctc ccttactgtc aggggatatg gaacttcaaa |
| 1441 | ggcccacatg gcaagccagg taacataaat gtgtgaaaaa gtaaagataa ctaaaaaatt |
| 1501 | tagaaaaata aatccagtat ttgtaaagtg aataacttca tttctaattg tttaattttt |
| 1561 | aaaattctga tttttatata ttgagtttaa gcaaggcatt cttacacgag gaagtgaagt |
| 1621 | aaattttagt tcagacataa aatttcactt attaggaata tgtaacatgc taaaactttt |
| 1681 | ttttttttaa agagtactga gtcacaacat gttttagagc atccaagtac catataatcc |
| 1741 | aactatcatg gtaaggccag aaatcttcta acctaccaga gcctagatga gacaccgaat |
| 1801 | taacattaaa atttcagtaa ctgactgtcc ctcatgtcca tggcctacca tcccttctga |
| 1861 | ccctggcttc cagggaccta tgtcttttaa tactcactgt cacattgggc aaagttgctt |
| 1921 | ctaatcctta tttcccatgt gcacaagtct ttttgtattc cagcttcctg ataacactgc |
| 1981 | ttactgtgga atattcattt gacatctgtc tcttttcatt tcttttaact accatgccct |
| 2041 | tgatatatct tttgcacctg ctgaacttca tttctgtatc acctgacctc tggatgccaa |
| 2101 | aacgtttatt ctgctttgtc tgttgtagaa ttttagataa agctattaat ggcaatattt |
| 2161 | ttttgctaaa cgtttttgtt ttttactgtc actagggcaa taaaatttat actcaaccat |
| 2221 | ataataacat tttttaacta ctaaaggagt agtttttatt ttaaagtctt agcaatttct |
| 2281 | attacaactt ttcttagact taacacttat gataaatgac taacatagta acagaatctt |
| 2341 | tatgaaatat gaccttttct gaaaatacat acttttacat ttctacttta ttgagaccta |
| 2401 | ttagatgtaa gtgctagtag aatataagat aaaagaggct gagaattacc atacaagggt |
| 2461 | attacaactg taaaacaatt tatctttgtt tcattgttct gtcaataatt gttaccaaag |
| 2521 | agataaaaat aaaagcagaa tgtatatcat cccatctgaa aaacactaat tattgacatg |
| 2581 | tgcatctgta caataaactt aaaatgatta ttaaataatc aaatatatct actacattgt |
| 2641 | ttatattatt gaataaagta tattttccaa atgtaaaaaa aaaaaaa |
| Human IL-33 mRNA Variant 8 | |
| (SEQ ID NO: 103) | |
| 1 | agtctacaga ctcctccgaa cacagagctg cagctcttca gggaagaaat caaaacaaga |
| 61 | tcacaagaat actgaaaaat gaagcctaaa atgaagtatt caaccaacaa aatttccaca |
| 121 | gcaaagtgga agaacacagc aagcaaagcc ttgtgtttca agctgggaaa atcccaacag |
| 181 | aaggccaaag aagtttgccc catgtacttt atgaagctcc gctctggcct tatgataaaa |
| 241 | aaggaggcct gttactttag gagagaaacc accaaaaggc cttcactgaa aacaggaatt |
| 301 | tcacctatta cagagtatct tgcttctcta agcacataca atgatcaatc cattactttt |
| 361 | gctttggagg atgaaagtta tgagatatat gttgaagact tgaaaaaaga tgaaaagaaa |
| 421 | gataaggtgt tactgagtta ctatgagtct caacacccct caaatgaatc aggtgacggt |
| 481 | gttgatggta agatgttaat ggtaaccctg agtcctacaa aagacttctg gttgcatgcc |
| 541 | aacaacaagg aacactctgt ggagctccat aagtgtgaaa aaccactgcc agaccaggcc |
| 601 | ttctttgtcc ttcataatat gcactccaac tgtgtttcat ttgaatgcaa gactgatcct |
| 661 | ggagtgttta taggtgtaaa ggataatcat cttgctctga ttaaagtaga ctcttctgag |
| 721 | aatttgtgta ctgaaaatat cttgtttaag ctctctgaaa cttagttgat ggaaacctgt |
| 781 | gagtcttggg ttgagtaccc aaatgctacc actggagaag gaatgagaga taaagaaaga |
| 841 | gacaggtgac atctaaggga aatgaagagt gcttagcatg tgtggaatgt tttccatatt |
| 901 | atgtataaaa atattttttc taatcctcca gttattcttt tatttccctc tgtataactg |
| 961 | catcttcaat acaagtatca gtatattaaa tagggtattg gtaaagaaac ggtcaacatt |
| 1021 | ctaaagagat acagtctgac ctttactttt ctctagtttc agtccagaaa gaacttcata |
| 1081 | tttagagcta aggccactga ggaaagagcc atagcttaag tctctatgta gacagggatc |
| 1141 | cattttaaag agctacttag agaaataatt ttccacagtt ccaaacgata ggctcaaaca |
| 1201 | ctagagctgc tagtaaaaag aagaccagat gcttcacaga attatcattt tttcaactgg |
| 1261 | aataaaacac caggtttgtt tgtagatgtc ttaggcaaca ctcagagcag atctccctta |
| 1321 | ctgtcagggg atatggaact tcaaaggccc acatggcaag ccaggtaaca taaatgtgtg |
| 1381 | aaaaagtaaa gataactaaa aaatttagaa aaataaatcc agtatttgta aagtgaataa |
| 1441 | cttcatttct aattgtttaa tttttaaaat tctgattttt atatattgag tttaagcaag |
| 1501 | gcattcttac acgaggaagt gaagtaaatt ttagttcaga cataaaattt cacttattag |
| 1561 | gaatatgtaa catgctaaaa cttttttttt tttaaagagt actgagtcac aacatgtttt |
| 1621 | agagcatcca agtaccatat aatccaacta tcatggtaag gccagaaatc ttctaaccta |
| 1681 | ccagagccta gatgagacac cgaattaaca ttaaaatttc agtaactgac tgtccctcat |
| 1741 | gtccatggcc taccatccct tctgaccctg gcttccaggg acctatgtct tttaatactc |
| 1801 | actgtcacat tgggcaaagt tgcttctaat ccttatttcc catgtgcaca agtctttttg |
| 1861 | tattccagct tcctgataac actgcttact gtggaatatt catttgacat ctgtctcttt |
| 1921 | tcatttcttt taactaccat gcccttgata tatcttttgc acctgctgaa cttcatttct |
| 1981 | gtatcacctg acctctggat gccaaaacgt ttattctgct ttgtctgttg tagaatttta |
| 2041 | gataaagcta ttaatggcaa tatttttttg ctaaacgttt ttgtttttta ctgtcactag |
| 2101 | ggcaataaaa tttatactca accatataat aacatttttt aactactaaa ggagtagttt |
| 2161 | ttattttaaa gtcttagcaa tttctattac aacttttctt agacttaaca cttatgataa |
| 2221 | atgactaaca tagtaacaga atctttatga aatatgacct tttctgaaaa tacatacttt |
| 2281 | tacatttcta ctttattgag acctattaga tgtaagtgct agtagaatat aagataaaag |
| 2341 | aggctgagaa ttaccataca agggtattac aactgtaaaa caatttatct ttgtttcatt |
| 2401 | gttctgtcaa taattgttac caaagagata aaaataaaag cagaatgtat atcatcccat |
| 2461 | ctgaaaaaca ctaattattg acatgtgcat ctgtacaata aacttaaaat gattattaaa |
| 2521 | taatcaaata tatctactac attgtttata ttattgaata aagtatattt tccaaatgta |
| 2581 | aaaaaaaaaa aa |
| Human IL-1R1 mRNA Variant 1 | |
| (SEQ ID NO: 104) | |
| 1 | gtggccggcg gccggagccg actcggagcg cgcggcgccg gccgggagga gccggagagc |
| 61 | ggccgggccg ggcggtgggg gcgccggcct gccccgcgcg ccccagggag cggcaggaat |
| 121 | gtgacaatcg cgcgcccgcg caccgaagca ctcctcgctc ggctcctagg gctctcgccc |
| 181 | ctctgagctg agccgggttc cgcccggggc tgggatccca tcaccctcca cggccgtccg |
| 241 | tccaggtaga cgcaccctct gaagatggtg actccctcct gagaagctgg accccttggt |
| 301 | aaaagacaag gccttctcca agaagaatat gaaagtgtta ctcagactta tttgtttcat |
| 361 | agctctactg atttcttctc tggaggctga taaatgcaag gaacgtgaag aaaaaataat |
| 421 | tttagtgtca tctgcaaatg aaattgatgt tcgtccctgt cctcttaacc caaatgaaca |
| 481 | caaaggcact ataacttggt ataaagatga cagcaagaca cctgtatcta cagaacaagc |
| 541 | ctccaggatt catcaacaca aagagaaact ttggtttgtt cctgctaagg tggaggattc |
| 601 | aggacattac tattgcgtgg taagaaattc atcttactgc ctcagaatta aaataagtgc |
| 661 | aaaatttgtg gagaatgagc ctaacttatg ttataatgca caagccatat ttaagcagaa |
| 721 | actacccgtt gcaggagacg gaggacttgt gtgcccttat atggagtttt ttaaaaatga |
| 781 | aaataatgag ttacctaaat tacagtggta taaggattgc aaacctctac ttcttgacaa |
| 841 | tatacacttt agtggagtca aagataggct catcgtgatg aatgtggctg aaaagcatag |
| 901 | agggaactat acttgtcatg catcctacac atacttgggc aagcaatatc ctattacccg |
| 961 | ggtaatagaa tttattactc tagaggaaaa caaacccaca aggcctgtga ttgtgagccc |
| 1021 | agctaatgag acaatggaag tagacttggg atcccagata caattgatct gtaatgtcac |
| 1081 | cggccagttg agtgacattg cttactggaa gtggaatggg tcagtaattg atgaagatga |
| 1141 | cccagtgcta ggggaagact attacagtgt ggaaaatcct gcaaacaaaa gaaggagtac |
| 1201 | cctcatcaca gtgcttaata tatcggaaat tgaaagtaga ttttataaac atccatttac |
| 1261 | ctgttttgcc aagaatacac atggtataga tgcagcatat atccagttaa tatatccagt |
| 1321 | cactaatttc cagaagcaca tgattggtat atgtgtcacg ttgacagtca taattgtgtg |
| 1381 | ttctgttttc atctataaaa tcttcaagat tgacattgtg ctttggtaca gggattcctg |
| 1441 | ctatgatttt ctcccaataa aagcttcaga tggaaagacc tatgacgcat atatactgta |
| 1501 | tccaaagact gttggggaag ggtctacctc tgactgtgat atttttgtgt ttaaagtctt |
| 1561 | gcctgaggtc ttggaaaaac agtgtggata taagctgttc atttatggaa gggatgacta |
| 1621 | cgttggggaa gacattgttg aggtcattaa tgaaaacgta aagaaaagca gaagactgat |
| 1681 | tatcatttta gtcagagaaa catcaggctt cagctggctg ggtggttcat ctgaagagca |
| 1741 | aatagccatg tataatgctc ttgttcagga tggaattaaa gttgtcctgc ttgagctgga |
| 1801 | gaaaatccaa gactatgaga aaatgccaga atcgattaaa ttcattaagc agaaacatgg |
| 1861 | ggctatccgc tggtcagggg actttacaca gggaccacag tctgcaaaga caaggttctg |
| 1921 | gaagaatgtc aggtaccaca tgccagtcca gcgacggtca ccttcatcta aacaccagtt |
| 1981 | actgtcacca gccactaagg agaaactgca aagagaggct cacgtgcctc tcgggtagca |
| 2041 | tggagaagtt gccaagagtt ctttaggtgc ctcctgtctt atggcgttgc aggccaggtt |
| 2101 | atgcctcatg ctgacttgca gagttcatgg aatgtaacta tatcatcctt tatccctgag |
| 2161 | gtcacctgga atcagattat taagggaata agccatgacg tcaatagcag cccagggcac |
| 2221 | ttcagagtag agggcttggg aagatctttt aaaaaggcag taggcccggt gtggtggctc |
| 2281 | acgcctataa tcccagcact ttgggaggct gaagtgggtg gatcaccaga ggtcaggagt |
| 2341 | tcgagaccag cccagccaac atggcaaaac cccatctcta ctaaaaatac aaaaatgagc |
| 2401 | taggcatggt ggcacacgcc tgtaatccca gctacacctg aggctgaggc aggagaattg |
| 2461 | cttgaaccgg ggagacggag gttgcagtga gccgagtttg ggccactgca ctctagcctg |
| 2521 | gcaacagagc aagactccgt ctcaaaaaaa gggcaataaa tgccctctct gaatgtttga |
| 2581 | actgccaaga aaaggcatgg agacagcgaa ctagaagaaa gggcaagaag gaaatagcca |
| 2641 | ccgtctacag atggcttagt taagtcatcc acagcccaag ggcggggcta tgccttgtct |
| 2701 | ggggaccctg tagagtcact gaccctggag cggctctcct gagaggtgct gcaggcaaag |
| 2761 | tgagactgac acctcactga ggaagggaga catattcttg gagaactttc catctgcttg |
| 2821 | tattttccat acacatcccc agccagaagt tagtgtccga agaccgaatt ttattttaca |
| 2881 | gagcttgaaa actcacttca atgaacaaag ggattctcca ggattccaaa gttttgaagt |
| 2941 | catcttagct ttccacagga gggagagaac ttaaaaaagc aacagtagca gggaattgat |
| 3001 | ccacttctta atgctttcct ccctggcatg accatcctgt cctttgttat tatcctgcat |
| 3061 | tttacgtctt tggaggaaca gctccctagt ggcttcctcc gtctgcaatg tcccttgcac |
| 3121 | agcccacaca tgaaccatcc ttcccatgat gccgctcttc tgtcatcccg ctcctgctga |
| 3181 | aacacctccc aggggctcca cctgttcagg agctgaagcc catgctttcc caccagcatg |
| 3241 | tcactcccag accacctccc tgccctgtcc tccagcttcc cctcgctgtc ctgctgtgtg |
| 3301 | aattcccagg ttggcctggt ggccatgtcg cctgccccca gcactcctct gtctctgctc |
| 3361 | ttgcctgcac ccttcctcct cctttgccta ggaggccttc tcgcattttc tctagctgat |
| 3421 | cagaatttta ccaaaattca gaacatcctc caattccaca gtctctggga gactttccct |
| 3481 | aagaggcgac ttcctctcca gccttctctc tctggtcagg cccactgcag agatggtggt |
| 3541 | gagcacatct gggaggctgg tctccctcca gctggaattg ctgctctctg agggagaggc |
| 3601 | tgtggtggct gtctctgtcc ctcactgcct tccaggagca atttgcacat gtaacataga |
| 3661 | tttatgtaat gctttatgtt taaaaacatt ccccaattat cttatttaat ttttgcaatt |
| 3721 | attctaattt tatatataga gaaagtgacc tattttttaa aaaaatcaca ctctaagttc |
| 3781 | tattgaacct aggacttgag cctccatttc tggcttctag tctggtgttc tgagtacttg |
| 3841 | atttcaggtc aataacggtc ccccctcact ccacactggc acgtttgtga gaagaaatga |
| 3901 | cattttgcta ggaagtgacc gagtctagga atgcttttat tcaagacacc aaattccaaa |
| 3961 | cttctaaatg ttggaatttt caaaaattgt gtttagattt tatgaaaaac tcttctactt |
| 4021 | tcatctattc tttccctaga ggcaaacatt tcttaaaatg tttcattttc attaaaaatg |
| 4081 | aaagccaaat ttatatgcca ccgattgcag gacacaagca cagttttaag agttgtatga |
| 4141 | acatggagag gacttttggt ttttatattt ctcgtattta atatgggtga acaccaactt |
| 4201 | ttatttggaa taataatttt cctcctaaac aaaaacacat tgagtttaag tctctgactc |
| 4261 | ttgcctttcc acctgctttc tcctgggccc gctttgcctg cttgaaggaa cagtgctgtt |
| 4321 | ctggagctgc tgttccaaca gacagggcct agctttcatt tgacacacag actacagcca |
| 4381 | gaagcccatg gagcagggat gtcacgtctt gaaaagccta ttagatgttt tacaaattta |
| 4441 | attttgcaga ttattttagt ctgtcatcca gaaaatgtgt cagcatgcat agtgctaaga |
| 4501 | aagcaagcca atttggaaac ttaggttagt gacaaaattg gccagagagt gggggtgatg |
| 4561 | atgaccaaga attacaagta gaatggcagc tggaatttaa ggagggacaa gaatcaatgg |
| 4621 | ataagcgtgg gtggaggaag atccaaacag aaaagtgcaa agttattccc catcttccaa |
| 4681 | gggttgaatt ctggaggaag aagacacatt cctagttccc cgtgaacttc ctttgactta |
| 4741 | ttgtccccac taaaacaaaa caaaaaactt ttaatgcctt ccacattaat tagattttct |
| 4801 | tgcagttttt ttatggcatt tttttaaaga tgccctaagt gttgaagaag agtttgcaaa |
| 4861 | tgcaacaaaa tatttaatta ccggttgtta aaactggttt agcacaattt atattttccc |
| 4921 | tctcttgcct ttcttatttg caataaaagg tattgagcca ttttttaaat gacatttttg |
| 4981 | ataaattatg tttgtactag ttgatgaagg agtttttttt aacctgttta tataattttg |
| 5041 | cagcagaagc caaatttttt gtatattaaa gcaccaaatt catgtacagc atgcatcacg |
| 5101 | gatcaataga ctgtacttat tttccaataa aattttcaaa ctttgtactg ttaaaaaaaa |
| 5161 | aaaaaaaaaa |
| Human IL-1R1 mRNA Variant 2 | |
| (SEQ ID NO: 105) | |
| 1 | attggcagct cttcacttgt atcttttcat atcaaaaatg ggaggtgaca cccagtttaa |
| 61 | ggaaaattcc aaggcatttg tctcgactaa tgtgaaagat gattacagtg gccagaggac |
| 121 | tgccaaggct ccttctcaag ctgcttgagt caatgagggt agacgcaccc tctgaagatg |
| 181 | gtgactccct cctgagaagc tggacccctt ggtaaaagac aaggccttct ccaagaagaa |
| 241 | tatgaaagtg ttactcagac ttatttgttt catagctcta ctgatttctt ctctggaggc |
| 301 | tgataaatgc aaggaacgtg aagaaaaaat aattttagtg tcatctgcaa atgaaattga |
| 361 | tgttcgtccc tgtcctctta acccaaatga acacaaaggc actataactt ggtataaaga |
| 421 | tgacagcaag acacctgtat ctacagaaca agcctccagg attcatcaac acaaagagaa |
| 481 | actttggttt gttcctgcta aggtggagga ttcaggacat tactattgcg tggtaagaaa |
| 541 | ttcatcttac tgcctcagaa ttaaaataag tgcaaaattt gtggagaatg agcctaactt |
| 601 | atgttataat gcacaagcca tatttaagca gaaactaccc gttgcaggag acggaggact |
| 661 | tgtgtgccct tatatggagt tttttaaaaa tgaaaataat gagttaccta aattacagtg |
| 721 | gtataaggat tgcaaacctc tacttcttga caatatacac tttagtggag tcaaagatag |
| 781 | gctcatcgtg atgaatgtgg ctgaaaagca tagagggaac tatacttgtc atgcatccta |
| 841 | cacatacttg ggcaagcaat atcctattac ccgggtaata gaatttatta ctctagagga |
| 901 | aaacaaaccc acaaggcctg tgattgtgag cccagctaat gagacaatgg aagtagactt |
| 961 | gggatcccag atacaattga tctgtaatgt caccggccag ttgagtgaca ttgcttactg |
| 1021 | gaagtggaat gggtcagtaa ttgatgaaga tgacccagtg ctaggggaag actattacag |
| 1081 | tgtggaaaat cctgcaaaca aaagaaggag taccctcatc acagtgctta atatatcgga |
| 1141 | aattgaaagt agattttata aacatccatt tacctgtttt gccaagaata cacatggtat |
| 1201 | agatgcagca tatatccagt taatatatcc agtcactaat ttccagaagc acatgattgg |
| 1261 | tatatgtgtc acgttgacag tcataattgt gtgttctgtt ttcatctata aaatcttcaa |
| 1321 | gattgacatt gtgctttggt acagggattc ctgctatgat tttctcccaa taaaagtctt |
| 1381 | gcctgaggtc ttggaaaaac agtgtggata taagctgttc atttatggaa gggatgacta |
| 1441 | cgttggggaa gacattgttg aggtcattaa tgaaaacgta aagaaaagca gaagactgat |
| 1501 | tatcatttta gtcagagaaa catcaggctt cagctggctg ggtggttcat ctgaagagca |
| 1561 | aatagccatg tataatgctc ttgttcagga tggaattaaa gttgtcctgc ttgagctgga |
| 1621 | gaaaatccaa gactatgaga aaatgccaga atcgattaaa ttcattaagc agaaacatgg |
| 1681 | ggctatccgc tggtcagggg actttacaca gggaccacag tctgcaaaga caaggttctg |
| 1741 | gaagaatgtc aggtaccaca tgccagtcca gcgacggtca ccttcatcta aacaccagtt |
| 1801 | actgtcacca gccactaagg agaaactgca aagagaggct cacgtgcctc tcgggtagca |
| 1861 | tggagaagtt gccaagagtt ctttaggtgc ctcctgtctt atggcgttgc aggccaggtt |
| 1921 | atgcctcatg ctgacttgca gagttcatgg aatgtaacta tatcatcctt tatccctgag |
| 1981 | gtcacctgga atcagattat taagggaata agccatgacg tcaatagcag cccagggcac |
| 2041 | ttcagagtag agggcttggg aagatctttt aaaaaggcag taggcccggt gtggtggctc |
| 2101 | acgcctataa tcccagcact ttgggaggct gaagtgggtg gatcaccaga ggtcaggagt |
| 2161 | tcgagaccag cccagccaac atggcaaaac cccatctcta ctaaaaatac aaaaatgagc |
| 2221 | taggcatggt ggcacacgcc tgtaatccca gctacacctg aggctgaggc aggagaattg |
| 2281 | cttgaaccgg ggagacggag gttgcagtga gccgagtttg ggccactgca ctctagcctg |
| 2341 | gcaacagagc aagactccgt ctcaaaaaaa gggcaataaa tgccctctct gaatgtttga |
| 2401 | actgccaaga aaaggcatgg agacagcgaa ctagaagaaa gggcaagaag gaaatagcca |
| 2461 | ccgtctacag atggcttagt taagtcatcc acagcccaag ggcggggcta tgccttgtct |
| 2521 | ggggaccctg tagagtcact gaccctggag cggctctcct gagaggtgct gcaggcaaag |
| 2581 | tgagactgac acctcactga ggaagggaga catattcttg gagaactttc catctgcttg |
| 2641 | tattttccat acacatcccc agccagaagt tagtgtccga agaccgaatt ttattttaca |
| 2701 | gagcttgaaa actcacttca atgaacaaag ggattctcca ggattccaaa gttttgaagt |
| 2761 | catcttagct ttccacagga gggagagaac ttaaaaaagc aacagtagca gggaattgat |
| 2821 | ccacttctta atgctttcct ccctggcatg accatcctgt cctttgttat tatcctgcat |
| 2881 | tttacgtctt tggaggaaca gctccctagt ggcttcctcc gtctgcaatg tcccttgcac |
| 2941 | agcccacaca tgaaccatcc ttcccatgat gccgctcttc tgtcatcccg ctcctgctga |
| 3001 | aacacctccc aggggctcca cctgttcagg agctgaagcc catgctttcc caccagcatg |
| 3061 | tcactcccag accacctccc tgccctgtcc tccagcttcc cctcgctgtc ctgctgtgtg |
| 3121 | aattcccagg ttggcctggt ggccatgtcg cctgccccca gcactcctct gtctctgctc |
| 3181 | ttgcctgcac ccttcctcct cctttgccta ggaggccttc tcgcattttc tctagctgat |
| 3241 | cagaatttta ccaaaattca gaacatcctc caattccaca gtctctggga gactttccct |
| 3301 | aagaggcgac ttcctctcca gccttctctc tctggtcagg cccactgcag agatggtggt |
| 3361 | gagcacatct gggaggctgg tctccctcca gctggaattg ctgctctctg agggagaggc |
| 3421 | tgtggtggct gtctctgtcc ctcactgcct tccaggagca atttgcacat gtaacataga |
| 3481 | tttatgtaat gctttatgtt taaaaacatt ccccaattat cttatttaat ttttgcaatt |
| 3541 | attctaattt tatatataga gaaagtgacc tattttttaa aaaaatcaca ctctaagttc |
| 3601 | tattgaacct aggacttgag cctccatttc tggcttctag tctggtgttc tgagtacttg |
| 3661 | atttcaggtc aataacggtc ccccctcact ccacactggc acgtttgtga gaagaaatga |
| 3721 | cattttgcta ggaagtgacc gagtctagga atgcttttat tcaagacacc aaattccaaa |
| 3781 | cttctaaatg ttggaatttt caaaaattgt gtttagattt tatgaaaaac tcttctactt |
| 3841 | tcatctattc tttccctaga ggcaaacatt tcttaaaatg tttcattttc attaaaaatg |
| 3901 | aaagccaaat ttatatgcca ccgattgcag gacacaagca cagttttaag agttgtatga |
| 3961 | acatggagag gacttttggt ttttatattt ctcgtattta atatgggtga acaccaactt |
| 4021 | ttatttggaa taataatttt cctcctaaac aaaaacacat tgagtttaag tctctgactc |
| 4081 | ttgcctttcc acctgctttc tcctgggccc gctttgcctg cttgaaggaa cagtgctgtt |
| 4141 | ctggagctgc tgttccaaca gacagggcct agctttcatt tgacacacag actacagcca |
| 4201 | gaagcccatg gagcagggat gtcacgtctt gaaaagccta ttagatgttt tacaaattta |
| 4261 | attttgcaga ttattttagt ctgtcatcca gaaaatgtgt cagcatgcat agtgctaaga |
| 4321 | aagcaagcca atttggaaac ttaggttagt gacaaaattg gccagagagt gggggtgatg |
| 4381 | atgaccaaga attacaagta gaatggcagc tggaatttaa ggagggacaa gaatcaatgg |
| 4441 | ataagcgtgg gtggaggaag atccaaacag aaaagtgcaa agttattccc catcttccaa |
| 4501 | gggttgaatt ctggaggaag aagacacatt cctagttccc cgtgaacttc ctttgactta |
| 4561 | ttgtccccac taaaacaaaa caaaaaactt ttaatgcctt ccacattaat tagattttct |
| 4621 | tgcagttttt ttatggcatt tttttaaaga tgccctaagt gttgaagaag agtttgcaaa |
| 4681 | tgcaacaaaa tatttaatta ccggttgtta aaactggttt agcacaattt atattttccc |
| 4741 | tctcttgcct ttcttatttg caataaaagg tattgagcca ttttttaaat gacatttttg |
| 4801 | ataaattatg tttgtactag ttgatgaagg agtttttttt aacctgttta tataattttg |
| 4861 | cagcagaagc caaatttttt gtatattaaa gcaccaaatt catgtacagc atgcatcacg |
| 4921 | gatcaataga ctgtacttat tttccaataa aattttcaaa ctttgtactg ttaaaaaaaa |
| 4981 | aaaaaaaaaa |
| Human IL-1R1 mRNA Variant 3 | |
| (SEQ ID NO: 106) | |
| 1 | attggcagct cttcacttgt atcttttcat atcaaaaatg ggaggtgaca cccagtttaa |
| 61 | ggaaaattcc aaggcatttg tctcgactaa tgtgaaagat gattacagtg gccagaggac |
| 121 | tgccaaggct ccttctcaag ctgcttgagt caatgagggt agacgcaccc tctgaagatg |
| 181 | gtgactccct cctgagaagc tggacccctt ggtaaaagac aaggccttct ccaagaagaa |
| 241 | tatgaaagtg ttactcagac ttatttgttt catagctcta ctgatttctt ctctggaggc |
| 301 | tgataaatgc aaggaacgtg aagaaaaaat aattttagtg tcatctgcaa atgaaattga |
| 361 | tgttcgtccc tgtcctctta acccaaatga acacaaaggc actataactt ggtataaaga |
| 421 | tgacagcaag acacctgtat ctacagaaca agcctccagg attcatcaac acaaagagaa |
| 481 | actttggttt gttcctgcta aggtggagga ttcaggacat tactattgcg tggtaagaaa |
| 541 | ttcatcttac tgcctcagaa ttaaaataag tgcaaaattt gtggagaatg agcctaactt |
| 601 | atgttataat gcacaagcca tatttaagca gaaactaccc gttgcaggag acggaggact |
| 661 | tgtgtgccct tatatggagt tttttaaaaa tgaaaataat gagttaccta aattacagtg |
| 721 | gtataaggat tgcaaacctc tacttcttga caatatacac tttagtggag tcaaagatag |
| 781 | gctcatcgtg atgaatgtgg ctgaaaagca tagagggaac tatacttgtc atgcatccta |
| 841 | cacatacttg ggcaagcaat atcctattac ccgggtaata gaatttatta ctctagagga |
| 901 | aaacaaaccc acaaggcctg tgattgtgag cccagctaat gagacaatgg aagtagactt |
| 961 | gggatcccag atacaattga tctgtaatgt caccggccag ttgagtgaca ttgcttactg |
| 1021 | gaagtggaat gggtcagtaa ttgatgaaga tgacccagtg ctaggggaag actattacag |
| 1081 | tgtggaaaat cctgcaaaca aaagaaggag taccctcatc acagtgctta atatatcgga |
| 1141 | aattgaaagt agattttata aacatccatt tacctgtttt gccaagaata cacatggtat |
| 1201 | agatgcagca tatatccagt taatatatcc agtcactaat ttccagaagc acatgattgg |
| 1261 | tatatgtgtc acgttgacag tcataattgt gtgttctgtt ttcatctata aaatcttcaa |
| 1321 | gattgacatt gtgctttggt acagggattc ctgctatgat tttctcccaa taaaagcttc |
| 1381 | agatggaaag acctatgacg catatatact gtatccaaag actgttgggg aagggtctac |
| 1441 | ctctgactgt gatatttttg tgtttaaagt cttgcctgag gtcttggaaa aacagtgtgg |
| 1501 | atataagctg ttcatttatg gaagggatga ctacgttggg gaagacattg ttgaggtcat |
| 1561 | taatgaaaac gtaaagaaaa gcagaagact gattatcatt ttagtcagag aaacatcagg |
| 1621 | cttcagctgg ctgggtggtt catctgaaga gcaaatagcc atgtataatg ctcttgttca |
| 1681 | ggatggaatt aaagttgtcc tgcttgagct ggagaaaatc caagactatg agaaaatgcc |
| 1741 | agaatcgatt aaattcatta agcagaaaca tggggctatc cgctggtcag gggactttac |
| 1801 | acagggacca cagtctgcaa agacaaggtt ctggaagaat gtcaggtacc acatgccagt |
| 1861 | ccagcgacgg tcaccttcat ctaaacacca gttactgtca ccagccacta aggagaaact |
| 1921 | gcaaagagag gctcacgtgc ctctcgggta gcatggagaa gttgccaaga gttctttagg |
| 1981 | tgcctcctgt cttatggcgt tgcaggccag gttatgcctc atgctgactt gcagagttca |
| 2041 | tggaatgtaa ctatatcatc ctttatccct gaggtcacct ggaatcagat tattaaggga |
| 2101 | ataagccatg acgtcaatag cagcccaggg cacttcagag tagagggctt gggaagatct |
| 2161 | tttaaaaagg cagtaggccc ggtgtggtgg ctcacgccta taatcccagc actttgggag |
| 2221 | gctgaagtgg gtggatcacc agaggtcagg agttcgagac cagcccagcc aacatggcaa |
| 2281 | aaccccatct ctactaaaaa tacaaaaatg agctaggcat ggtggcacac gcctgtaatc |
| 2341 | ccagctacac ctgaggctga ggcaggagaa ttgcttgaac cggggagacg gaggttgcag |
| 2401 | tgagccgagt ttgggccact gcactctagc ctggcaacag agcaagactc cgtctcaaaa |
| 2461 | aaagggcaat aaatgccctc tctgaatgtt tgaactgcca agaaaaggca tggagacagc |
| 2521 | gaactagaag aaagggcaag aaggaaatag ccaccgtcta cagatggctt agttaagtca |
| 2581 | tccacagccc aagggcgggg ctatgccttg tctggggacc ctgtagagtc actgaccctg |
| 2641 | gagcggctct cctgagaggt gctgcaggca aagtgagact gacacctcac tgaggaaggg |
| 2701 | agacatattc ttggagaact ttccatctgc ttgtattttc catacacatc cccagccaga |
| 2761 | agttagtgtc cgaagaccga attttatttt acagagcttg aaaactcact tcaatgaaca |
| 2821 | aagggattct ccaggattcc aaagttttga agtcatctta gctttccaca ggagggagag |
| 2881 | aacttaaaaa agcaacagta gcagggaatt gatccacttc ttaatgcttt cctccctggc |
| 2941 | atgaccatcc tgtcctttgt tattatcctg cattttacgt ctttggagga acagctccct |
| 3001 | agtggcttcc tccgtctgca atgtcccttg cacagcccac acatgaacca tccttcccat |
| 3061 | gatgccgctc ttctgtcatc ccgctcctgc tgaaacacct cccaggggct ccacctgttc |
| 3121 | aggagctgaa gcccatgctt tcccaccagc atgtcactcc cagaccacct ccctgccctg |
| 3181 | tcctccagct tcccctcgct gtcctgctgt gtgaattccc aggttggcct ggtggccatg |
| 3241 | tcgcctgccc ccagcactcc tctgtctctg ctcttgcctg cacccttcct cctcctttgc |
| 3301 | ctaggaggcc ttctcgcatt ttctctagct gatcagaatt ttaccaaaat tcagaacatc |
| 3361 | ctccaattcc acagtctctg ggagactttc cctaagaggc gacttcctct ccagccttct |
| 3421 | ctctctggtc aggcccactg cagagatggt ggtgagcaca tctgggaggc tggtctccct |
| 3481 | ccagctggaa ttgctgctct ctgagggaga ggctgtggtg gctgtctctg tccctcactg |
| 3541 | ccttccagga gcaatttgca catgtaacat agatttatgt aatgctttat gtttaaaaac |
| 3601 | attccccaat tatcttattt aatttttgca attattctaa ttttatatat agagaaagtg |
| 3661 | acctattttt taaaaaaatc acactctaag ttctattgaa cctaggactt gagcctccat |
| 3721 | ttctggcttc tagtctggtg ttctgagtac ttgatttcag gtcaataacg gtcccccctc |
| 3781 | actccacact ggcacgtttg tgagaagaaa tgacattttg ctaggaagtg accgagtcta |
| 3841 | ggaatgcttt tattcaagac accaaattcc aaacttctaa atgttggaat tttcaaaaat |
| 3901 | tgtgtttaga ttttatgaaa aactcttcta ctttcatcta ttctttccct agaggcaaac |
| 3961 | atttcttaaa atgtttcatt ttcattaaaa atgaaagcca aatttatatg ccaccgattg |
| 4021 | caggacacaa gcacagtttt aagagttgta tgaacatgga gaggactttt ggtttttata |
| 4081 | tttctcgtat ttaatatggg tgaacaccaa cttttatttg gaataataat tttcctccta |
| 4141 | aacaaaaaca cattgagttt aagtctctga ctcttgcctt tccacctgct ttctcctggg |
| 4201 | cccgctttgc ctgcttgaag gaacagtgct gttctggagc tgctgttcca acagacaggg |
| 4261 | cctagctttc atttgacaca cagactacag ccagaagccc atggagcagg gatgtcacgt |
| 4321 | cttgaaaagc ctattagatg ttttacaaat ttaattttgc agattatttt agtctgtcat |
| 4381 | ccagaaaatg tgtcagcatg catagtgcta agaaagcaag ccaatttgga aacttaggtt |
| 4441 | agtgacaaaa ttggccagag agtgggggtg atgatgacca agaattacaa gtagaatggc |
| 4501 | agctggaatt taaggaggga caagaatcaa tggataagcg tgggtggagg aagatccaaa |
| 4561 | cagaaaagtg caaagttatt ccccatcttc caagggttga attctggagg aagaagacac |
| 4621 | attcctagtt ccccgtgaac ttcctttgac ttattgtccc cactaaaaca aaacaaaaaa |
| 4681 | cttttaatgc cttccacatt aattagattt tcttgcagtt tttttatggc atttttttaa |
| 4741 | agatgcccta agtgttgaag aagagtttgc aaatgcaaca aaatatttaa ttaccggttg |
| 4801 | ttaaaactgg tttagcacaa tttatatttt ccctctcttg cctttcttat ttgcaataaa |
| 4861 | aggtattgag ccatttttta aatgacattt ttgataaatt atgtttgtac tagttgatga |
| 4921 | aggagttttt tttaacctgt ttatataatt ttgcagcaga agccaaattt tttgtatatt |
| 4981 | aaagcaccaa attcatgtac agcatgcatc acggatcaat agactgtact tattttccaa |
| 5041 | taaaattttc aaactttgta ctgttaaaaa aaaaaaaaaa aaa |
| Human IL-1R1 mRNA Variant 4 | |
| (SEQ ID NO: 107) | |
| 1 | attaaagccc taagaggctg tgacacagcc atctccaaaa ccccactttc tccttccttt |
| 61 | gagcctccgt accagctggg gcgtccggca agatgtgagt tgtcactctg ctgcggcaca |
| 121 | gacctgaatt aacaactcta gctagggctg acttcaaaaa gcactttcgt tttttaataa |
| 181 | ccaacatcag ctcagcaggc ttcatttggg aaaagaaacc ttgtcggatt accccgacat |
| 241 | tctccacctc ctgggaggcc agccattccc aaatgcccca aggatgaaga acggagacgg |
| 301 | tagacgcacc ctctgaagat ggtgactccc tcctgagaag ctggacccct tggtaaaaga |
| 361 | caaggccttc tccaagaaga atatgaaagt gttactcaga cttatttgtt tcatagctct |
| 421 | actgatttct tctctggagg ctgataaatg caaggaacgt gaagaaaaaa taattttagt |
| 481 | gtcatctgca aatgaaattg atgttcgtcc ctgtcctctt aacccaaatg aacacaaagg |
| 541 | cactataact tggtataaag atgacagcaa gacacctgta tctacagaac aagcctccag |
| 601 | gattcatcaa cacaaagaga aactttggtt tgttcctgct aaggtggagg attcaggaca |
| 661 | ttactattgc gtggtaagaa attcatctta ctgcctcaga attaaaataa gtgcaaaatt |
| 721 | tgtggagaat gagcctaact tatgttataa tgcacaagcc atatttaagc agaaactacc |
| 781 | cgttgcagga gacggaggac ttgtgtgccc ttatatggag ttttttaaaa atgaaaataa |
| 841 | tgagttacct aaattacagt ggtataagga ttgcaaacct ctacttcttg acaatataca |
| 901 | ctttagtgga gtcaaagata ggctcatcgt gatgaatgtg gctgaaaagc atagagggaa |
| 961 | ctatacttgt catgcatcct acacatactt gggcaagcaa tatcctatta cccgggtaat |
| 1021 | agaatttatt actctagagg aaaacaaacc cacaaggcct gtgattgtga gcccagctaa |
| 1081 | tgagacaatg gaagtagact tgggatccca gatacaattg atctgtaatg tcaccggcca |
| 1141 | gttgagtgac attgcttact ggaagtggaa tgggtcagta attgatgaag atgacccagt |
| 1201 | gctaggggaa gactattaca gtgtggaaaa tcctgcaaac aaaagaagga gtaccctcat |
| 1261 | cacagtgctt aatatatcgg aaattgaaag tagattttat aaacatccat ttacctgttt |
| 1321 | tgccaagaat acacatggta tagatgcagc atatatccag ttaatatatc cagtcactaa |
| 1381 | tttccagaag cacatgattg gtatatgtgt cacgttgaca gtcataattg tgtgttctgt |
| 1441 | tttcatctat aaaatcttca agattgacat tgtgctttgg tacagggatt cctgctatga |
| 1501 | ttttctccca ataaaagctt cagatggaaa gacctatgac gcatatatac tgtatccaaa |
| 1561 | gactgttggg gaagggtcta cctctgactg tgatattttt gtgtttaaag tcttgcctga |
| 1621 | ggtcttggaa aaacagtgtg gatataagct gttcatttat ggaagggatg actacgttgg |
| 1681 | ggaagacatt gttgaggtca ttaatgaaaa cgtaaagaaa agcagaagac tgattatcat |
| 1741 | tttagtcaga gaaacatcag gcttcagctg gctgggtggt tcatctgaag agcaaatagc |
| 1801 | catgtataat gctcttgttc aggatggaat taaagttgtc ctgcttgagc tggagaaaat |
| 1861 | ccaagactat gagaaaatgc cagaatcgat taaattcatt aagcagaaac atggggctat |
| 1921 | ccgctggtca ggggacttta cacagggacc acagtctgca aagacaaggt tctggaagaa |
| 1981 | tgtcaggtac cacatgccag tccagcgacg gtcaccttca tctaaacacc agttactgtc |
| 2041 | accagccact aaggagaaac tgcaaagaga ggctcacgtg cctctcgggt agcatggaga |
| 2101 | agttgccaag agttctttag gtgcctcctg tcttatggcg ttgcaggcca ggttatgcct |
| 2161 | catgctgact tgcagagttc atggaatgta actatatcat cctttatccc tgaggtcacc |
| 2221 | tggaatcaga ttattaaggg aataagccat gacgtcaata gcagcccagg gcacttcaga |
| 2281 | gtagagggct tgggaagatc ttttaaaaag gcagtaggcc cggtgtggtg gctcacgcct |
| 2341 | ataatcccag cactttggga ggctgaagtg ggtggatcac cagaggtcag gagttcgaga |
| 2401 | ccagcccagc caacatggca aaaccccatc tctactaaaa atacaaaaat gagctaggca |
| 2461 | tggtggcaca cgcctgtaat cccagctaca cctgaggctg aggcaggaga attgcttgaa |
| 2521 | ccggggagac ggaggttgca gtgagccgag tttgggccac tgcactctag cctggcaaca |
| 2581 | gagcaagact ccgtctcaaa aaaagggcaa taaatgccct ctctgaatgt ttgaactgcc |
| 2641 | aagaaaaggc atggagacag cgaactagaa gaaagggcaa gaaggaaata gccaccgtct |
| 2701 | acagatggct tagttaagtc atccacagcc caagggcggg gctatgcctt gtctggggac |
| 2761 | cctgtagagt cactgaccct ggagcggctc tcctgagagg tgctgcaggc aaagtgagac |
| 2821 | tgacacctca ctgaggaagg gagacatatt cttggagaac tttccatctg cttgtatttt |
| 2881 | ccatacacat ccccagccag aagttagtgt ccgaagaccg aattttattt tacagagctt |
| 2941 | gaaaactcac ttcaatgaac aaagggattc tccaggattc caaagttttg aagtcatctt |
| 3001 | agctttccac aggagggaga gaacttaaaa aagcaacagt agcagggaat tgatccactt |
| 3061 | cttaatgctt tcctccctgg catgaccatc ctgtcctttg ttattatcct gcattttacg |
| 3121 | tctttggagg aacagctccc tagtggcttc ctccgtctgc aatgtccctt gcacagccca |
| 3181 | cacatgaacc atccttccca tgatgccgct cttctgtcat cccgctcctg ctgaaacacc |
| 3241 | tcccaggggc tccacctgtt caggagctga agcccatgct ttcccaccag catgtcactc |
| 3301 | ccagaccacc tccctgccct gtcctccagc ttcccctcgc tgtcctgctg tgtgaattcc |
| 3361 | caggttggcc tggtggccat gtcgcctgcc cccagcactc ctctgtctct gctcttgcct |
| 3421 | gcacccttcc tcctcctttg cctaggaggc cttctcgcat tttctctagc tgatcagaat |
| 3481 | tttaccaaaa ttcagaacat cctccaattc cacagtctct gggagacttt ccctaagagg |
| 3541 | cgacttcctc tccagccttc tctctctggt caggcccact gcagagatgg tggtgagcac |
| 3601 | atctgggagg ctggtctccc tccagctgga attgctgctc tctgagggag aggctgtggt |
| 3661 | ggctgtctct gtccctcact gccttccagg agcaatttgc acatgtaaca tagatttatg |
| 3721 | taatgcttta tgtttaaaaa cattccccaa ttatcttatt taatttttgc aattattcta |
| 3781 | attttatata tagagaaagt gacctatttt ttaaaaaaat cacactctaa gttctattga |
| 3841 | acctaggact tgagcctcca tttctggctt ctagtctggt gttctgagta cttgatttca |
| 3901 | ggtcaataac ggtcccccct cactccacac tggcacgttt gtgagaagaa atgacatttt |
| 3961 | gctaggaagt gaccgagtct aggaatgctt ttattcaaga caccaaattc caaacttcta |
| 4021 | aatgttggaa ttttcaaaaa ttgtgtttag attttatgaa aaactcttct actttcatct |
| 4081 | attctttccc tagaggcaaa catttcttaa aatgtttcat tttcattaaa aatgaaagcc |
| 4141 | aaatttatat gccaccgatt gcaggacaca agcacagttt taagagttgt atgaacatgg |
| 4201 | agaggacttt tggtttttat atttctcgta tttaatatgg gtgaacacca acttttattt |
| 4261 | ggaataataa ttttcctcct aaacaaaaac acattgagtt taagtctctg actcttgcct |
| 4321 | ttccacctgc tttctcctgg gcccgctttg cctgcttgaa ggaacagtgc tgttctggag |
| 4381 | ctgctgttcc aacagacagg gcctagcttt catttgacac acagactaca gccagaagcc |
| 4441 | catggagcag ggatgtcacg tcttgaaaag cctattagat gttttacaaa tttaattttg |
| 4501 | cagattattt tagtctgtca tccagaaaat gtgtcagcat gcatagtgct aagaaagcaa |
| 4561 | gccaatttgg aaacttaggt tagtgacaaa attggccaga gagtgggggt gatgatgacc |
| 4621 | aagaattaca agtagaatgg cagctggaat ttaaggaggg acaagaatca atggataagc |
| 4681 | gtgggtggag gaagatccaa acagaaaagt gcaaagttat tccccatctt ccaagggttg |
| 4741 | aattctggag gaagaagaca cattcctagt tccccgtgaa cttcctttga cttattgtcc |
| 4801 | ccactaaaac aaaacaaaaa acttttaatg ccttccacat taattagatt ttcttgcagt |
| 4861 | ttttttatgg cattttttta aagatgccct aagtgttgaa gaagagtttg caaatgcaac |
| 4921 | aaaatattta attaccggtt gttaaaactg gtttagcaca atttatattt tccctctctt |
| 4981 | gcctttctta tttgcaataa aaggtattga gccatttttt aaatgacatt tttgataaat |
| 5041 | tatgtttgta ctagttgatg aaggagtttt ttttaacctg tttatataat tttgcagcag |
| 5101 | aagccaaatt ttttgtatat taaagcacca aattcatgta cagcatgcat cacggatcaa |
| 5161 | tagactgtac ttattttcca ataaaatttt caaactttgt actgttaaaa aaaaaaaaaa |
| 5221 | aaaa |
| Human IL-1R1 mRNA Variant 5 | |
| (SEQ ID NO: 108) | |
| 1 | aggatggccc atgaagacct ccaaacaagc tggaggggcc agtcacttgc tgaagactag |
| 61 | cgaagtggag ggggaaagcc cgagggagct gcagactcga ccactgcgcc ctcccctcct |
| 121 | ctccctgcaa ggagcccaag gtagacgcac cctctgaaga tggtgactcc ctcctgagaa |
| 181 | gctggacccc ttggtaaaag acaaggcctt ctccaagaag aatatgaaag tgttactcag |
| 241 | acttatttgt ttcatagctc tactgatttc ttctctggag gctgataaat gcaaggaacg |
| 301 | tgaagaaaaa ataattttag tgtcatctgc aaatgaaatt gatgttcgtc cctgtcctct |
| 361 | taacccaaat gaacacaaag gcactataac ttggtataaa gatgacagca agacacctgt |
| 421 | atctacagaa caagcctcca ggattcatca acacaaagag aaactttggt ttgttcctgc |
| 481 | taaggtggag gattcaggac attactattg cgtggtaaga aattcatctt actgcctcag |
| 541 | aattaaaata agtgcaaaat ttgtggagaa tgagcctaac ttatgttata atgcacaagc |
| 601 | catatttaag cagaaactac ccgttgcagg agacggagga cttgtgtgcc cttatatgga |
| 661 | gttttttaaa aatgaaaata atgagttacc taaattacag tggtataagg attgcaaacc |
| 721 | tctacttctt gacaatatac actttagtgg agtcaaagat aggctcatcg tgatgaatgt |
| 781 | ggctgaaaag catagaggga actatacttg tcatgcatcc tacacatact tgggcaagca |
| 841 | atatcctatt acccgggtaa tagaatttat tactctagag gaaaacaaac ccacaaggcc |
| 901 | tgtgattgtg agcccagcta atgagacaat ggaagtagac ttgggatccc agatacaatt |
| 961 | gatctgtaat gtcaccggcc agttgagtga cattgcttac tggaagtgga atgggtcagt |
| 1021 | aattgatgaa gatgacccag tgctagggga agactattac agtgtggaaa atcctgcaaa |
| 1081 | caaaagaagg agtaccctca tcacagtgct taatatatcg gaaattgaaa gtagatttta |
| 1141 | taaacatcca tttacctgtt ttgccaagaa tacacatggt atagatgcag catatatcca |
| 1201 | gttaatatat ccagtcacta atttccagaa gcacatgatt ggtatatgtg tcacgttgac |
| 1261 | agtcataatt gtgtgttctg ttttcatcta taaaatcttc aagattgaca ttgtgctttg |
| 1321 | gtacagggat tcctgctatg attttctccc aataaaagct tcagatggaa agacctatga |
| 1381 | cgcatatata ctgtatccaa agactgttgg ggaagggtct acctctgact gtgatatttt |
| 1441 | tgtgtttaaa gtcttgcctg aggtcttgga aaaacagtgt ggatataagc tgttcattta |
| 1501 | tggaagggat gactacgttg gggaagacat tgttgaggtc attaatgaaa acgtaaagaa |
| 1561 | aagcagaaga ctgattatca ttttagtcag agaaacatca ggcttcagct ggctgggtgg |
| 1621 | ttcatctgaa gagcaaatag ccatgtataa tgctcttgtt caggatggaa ttaaagttgt |
| 1681 | cctgcttgag ctggagaaaa tccaagacta tgagaaaatg ccagaatcga ttaaattcat |
| 1741 | taagcagaaa catggggcta tccgctggtc aggggacttt acacagggac cacagtctgc |
| 1801 | aaagacaagg ttctggaaga atgtcaggta ccacatgcca gtccagcgac ggtcaccttc |
| 1861 | atctaaacac cagttactgt caccagccac taaggagaaa ctgcaaagag aggctcacgt |
| 1921 | gcctctcggg tagcatggag aagttgccaa gagttcttta ggtgcctcct gtcttatggc |
| 1981 | gttgcaggcc aggttatgcc tcatgctgac ttgcagagtt catggaatgt aactatatca |
| 2041 | tcctttatcc ctgaggtcac ctggaatcag attattaagg gaataagcca tgacgtcaat |
| 2101 | agcagcccag ggcacttcag agtagagggc ttgggaagat cttttaaaaa ggcagtaggc |
| 2161 | ccggtgtggt ggctcacgcc tataatccca gcactttggg aggctgaagt gggtggatca |
| 2221 | ccagaggtca ggagttcgag accagcccag ccaacatggc aaaaccccat ctctactaaa |
| 2281 | aatacaaaaa tgagctaggc atggtggcac acgcctgtaa tcccagctac acctgaggct |
| 2341 | gaggcaggag aattgcttga accggggaga cggaggttgc agtgagccga gtttgggcca |
| 2401 | ctgcactcta gcctggcaac agagcaagac tccgtctcaa aaaaagggca ataaatgccc |
| 2461 | tctctgaatg tttgaactgc caagaaaagg catggagaca gcgaactaga agaaagggca |
| 2521 | agaaggaaat agccaccgtc tacagatggc ttagttaagt catccacagc ccaagggcgg |
| 2581 | ggctatgcct tgtctgggga ccctgtagag tcactgaccc tggagcggct ctcctgagag |
| 2641 | gtgctgcagg caaagtgaga ctgacacctc actgaggaag ggagacatat tcttggagaa |
| 2701 | ctttccatct gcttgtattt tccatacaca tccccagcca gaagttagtg tccgaagacc |
| 2761 | gaattttatt ttacagagct tgaaaactca cttcaatgaa caaagggatt ctccaggatt |
| 2821 | ccaaagtttt gaagtcatct tagctttcca caggagggag agaacttaaa aaagcaacag |
| 2881 | tagcagggaa ttgatccact tcttaatgct ttcctccctg gcatgaccat cctgtccttt |
| 2941 | gttattatcc tgcattttac gtctttggag gaacagctcc ctagtggctt cctccgtctg |
| 3001 | caatgtccct tgcacagccc acacatgaac catccttccc atgatgccgc tcttctgtca |
| 3061 | tcccgctcct gctgaaacac ctcccagggg ctccacctgt tcaggagctg aagcccatgc |
| 3121 | tttcccacca gcatgtcact cccagaccac ctccctgccc tgtcctccag cttcccctcg |
| 3181 | ctgtcctgct gtgtgaattc ccaggttggc ctggtggcca tgtcgcctgc ccccagcact |
| 3241 | cctctgtctc tgctcttgcc tgcacccttc ctcctccttt gcctaggagg ccttctcgca |
| 3301 | ttttctctag ctgatcagaa ttttaccaaa attcagaaca tcctccaatt ccacagtctc |
| 3361 | tgggagactt tccctaagag gcgacttcct ctccagcctt ctctctctgg tcaggcccac |
| 3421 | tgcagagatg gtggtgagca catctgggag gctggtctcc ctccagctgg aattgctgct |
| 3481 | ctctgaggga gaggctgtgg tggctgtctc tgtccctcac tgccttccag gagcaatttg |
| 3541 | cacatgtaac atagatttat gtaatgcttt atgtttaaaa acattcccca attatcttat |
| 3601 | ttaatttttg caattattct aattttatat atagagaaag tgacctattt tttaaaaaaa |
| 3661 | tcacactcta agttctattg aacctaggac ttgagcctcc atttctggct tctagtctgg |
| 3721 | tgttctgagt acttgatttc aggtcaataa cggtcccccc tcactccaca ctggcacgtt |
| 3781 | tgtgagaaga aatgacattt tgctaggaag tgaccgagtc taggaatgct tttattcaag |
| 3841 | acaccaaatt ccaaacttct aaatgttgga attttcaaaa attgtgttta gattttatga |
| 3901 | aaaactcttc tactttcatc tattctttcc ctagaggcaa acatttctta aaatgtttca |
| 3961 | ttttcattaa aaatgaaagc caaatttata tgccaccgat tgcaggacac aagcacagtt |
| 4021 | ttaagagttg tatgaacatg gagaggactt ttggttttta tatttctcgt atttaatatg |
| 4081 | ggtgaacacc aacttttatt tggaataata attttcctcc taaacaaaaa cacattgagt |
| 4141 | ttaagtctct gactcttgcc tttccacctg ctttctcctg ggcccgcttt gcctgcttga |
| 4201 | aggaacagtg ctgttctgga gctgctgttc caacagacag ggcctagctt tcatttgaca |
| 4261 | cacagactac agccagaagc ccatggagca gggatgtcac gtcttgaaaa gcctattaga |
| 4321 | tgttttacaa atttaatttt gcagattatt ttagtctgtc atccagaaaa tgtgtcagca |
| 4381 | tgcatagtgc taagaaagca agccaatttg gaaacttagg ttagtgacaa aattggccag |
| 4441 | agagtggggg tgatgatgac caagaattac aagtagaatg gcagctggaa tttaaggagg |
| 4501 | gacaagaatc aatggataag cgtgggtgga ggaagatcca aacagaaaag tgcaaagtta |
| 4561 | ttccccatct tccaagggtt gaattctgga ggaagaagac acattcctag ttccccgtga |
| 4621 | acttcctttg acttattgtc cccactaaaa caaaacaaaa aacttttaat gccttccaca |
| 4681 | ttaattagat tttcttgcag tttttttatg gcattttttt aaagatgccc taagtgttga |
| 4741 | agaagagttt gcaaatgcaa caaaatattt aattaccggt tgttaaaact ggtttagcac |
| 4801 | aatttatatt ttccctctct tgcctttctt atttgcaata aaaggtattg agccattttt |
| 4861 | taaatgacat ttttgataaa ttatgtttgt actagttgat gaaggagttt tttttaacct |
| 4921 | gtttatataa ttttgcagca gaagccaaat tttttgtata ttaaagcacc aaattcatgt |
| 4981 | acagcatgca tcacggatca atagactgta cttattttcc aataaaattt tcaaactttg |
| 5041 | tactgttaaa aaaaaaaaaa aaaaa |
| Human IL-1R1 mRNA Variant 6 | |
| (SEQ ID NO: 109) | |
| 1 | ctgatgccct ggagtcgcca actcaattcg cgggtcgcag ccaggctcca tgggggtagt |
| 61 | agagccaggt cgtagtggct aggtagacgc accctctgaa gatggtgact ccctcctgag |
| 121 | aagctggacc ccttggtaaa agacaaggcc ttctccaaga agaatatgaa agtgttactc |
| 181 | agacttattt gtttcatagc tctactgatt tcttctctgg aggctgataa atgcaaggaa |
| 241 | cgtgaagaaa aaataatttt agtgtcatct gcaaatgaaa ttgatgttcg tccctgtcct |
| 301 | cttaacccaa atgaacacaa aggcactata acttggtata aagatgacag caagacacct |
| 361 | gtatctacag aacaagcctc caggattcat caacacaaag agaaactttg gtttgttcct |
| 421 | gctaaggtgg aggattcagg acattactat tgcgtggtaa gaaattcatc ttactgcctc |
| 481 | agaattaaaa taagtgcaaa atttgtggag aatgagccta acttatgtta taatgcacaa |
| 541 | gccatattta agcagaaact acccgttgca ggagacggag gacttgtgtg cccttatatg |
| 601 | gagtttttta aaaatgaaaa taatgagtta cctaaattac agtggtataa ggattgcaaa |
| 661 | cctctacttc ttgacaatat acactttagt ggagtcaaag ataggctcat cgtgatgaat |
| 721 | gtggctgaaa agcatagagg gaactatact tgtcatgcat cctacacata cttgggcaag |
| 781 | caatatccta ttacccgggt aatagaattt attactctag aggaaaacaa acccacaagg |
| 841 | cctgtgattg tgagcccagc taatgagaca atggaagtag acttgggatc ccagatacaa |
| 901 | ttgatctgta atgtcaccgg ccagttgagt gacattgctt actggaagtg gaatgggtca |
| 961 | gtaattgatg aagatgaccc agtgctaggg gaagactatt acagtgtgga aaatcctgca |
| 1021 | aacaaaagaa ggagtaccct catcacagtg cttaatatat cggaaattga aagtagattt |
| 1081 | tataaacatc catttacctg ttttgccaag aatacacatg gtatagatgc agcatatatc |
| 1141 | cagttaatat atccagtcac taatttccag aagcacatga ttggtatatg tgtcacgttg |
| 1201 | acagtcataa ttgtgtgttc tgttttcatc tataaaatct tcaagattga cattgtgctt |
| 1261 | tggtacaggg attcctgcta tgattttctc ccaataaaag cttcagatgg aaagacctat |
| 1321 | gacgcatata tactgtatcc aaagactgtt ggggaagggt ctacctctga ctgtgatatt |
| 1381 | tttgtgttta aagtcttgcc tgaggtcttg gaaaaacagt gtggatataa gctgttcatt |
| 1441 | tatggaaggg atgactacgt tggggaagac attgttgagg tcattaatga aaacgtaaag |
| 1501 | aaaagcagaa gactgattat cattttagtc agagaaacat caggcttcag ctggctgggt |
| 1561 | ggttcatctg aagagcaaat agccatgtat aatgctcttg ttcaggatgg aattaaagtt |
| 1621 | gtcctgcttg agctggagaa aatccaagac tatgagaaaa tgccagaatc gattaaattc |
| 1681 | attaagcaga aacatggggc tatccgctgg tcaggggact ttacacaggg accacagtct |
| 1741 | gcaaagacaa ggttctggaa gaatgtcagg taccacatgc cagtccagcg acggtcacct |
| 1801 | tcatctaaac accagttact gtcaccagcc actaaggaga aactgcaaag agaggctcac |
| 1861 | gtgcctctcg ggtagcatgg agaagttgcc aagagttctt taggtgcctc ctgtcttatg |
| 1921 | gcgttgcagg ccaggttatg cctcatgctg acttgcagag ttcatggaat gtaactatat |
| 1981 | catcctttat ccctgaggtc acctggaatc agattattaa gggaataagc catgacgtca |
| 2041 | atagcagccc agggcacttc agagtagagg gcttgggaag atcttttaaa aaggcagtag |
| 2101 | gcccggtgtg gtggctcacg cctataatcc cagcactttg ggaggctgaa gtgggtggat |
| 2161 | caccagaggt caggagttcg agaccagccc agccaacatg gcaaaacccc atctctacta |
| 2221 | aaaatacaaa aatgagctag gcatggtggc acacgcctgt aatcccagct acacctgagg |
| 2281 | ctgaggcagg agaattgctt gaaccgggga gacggaggtt gcagtgagcc gagtttgggc |
| 2341 | cactgcactc tagcctggca acagagcaag actccgtctc aaaaaaaggg caataaatgc |
| 2401 | cctctctgaa tgtttgaact gccaagaaaa ggcatggaga cagcgaacta gaagaaaggg |
| 2461 | caagaaggaa atagccaccg tctacagatg gcttagttaa gtcatccaca gcccaagggc |
| 2521 | ggggctatgc cttgtctggg gaccctgtag agtcactgac cctggagcgg ctctcctgag |
| 2581 | aggtgctgca ggcaaagtga gactgacacc tcactgagga agggagacat attcttggag |
| 2641 | aactttccat ctgcttgtat tttccataca catccccagc cagaagttag tgtccgaaga |
| 2701 | ccgaatttta ttttacagag cttgaaaact cacttcaatg aacaaaggga ttctccagga |
| 2761 | ttccaaagtt ttgaagtcat cttagctttc cacaggaggg agagaactta aaaaagcaac |
| 2821 | agtagcaggg aattgatcca cttcttaatg ctttcctccc tggcatgacc atcctgtcct |
| 2881 | ttgttattat cctgcatttt acgtctttgg aggaacagct ccctagtggc ttcctccgtc |
| 2941 | tgcaatgtcc cttgcacagc ccacacatga accatccttc ccatgatgcc gctcttctgt |
| 3001 | catcccgctc ctgctgaaac acctcccagg ggctccacct gttcaggagc tgaagcccat |
| 3061 | gctttcccac cagcatgtca ctcccagacc acctccctgc cctgtcctcc agcttcccct |
| 3121 | cgctgtcctg ctgtgtgaat tcccaggttg gcctggtggc catgtcgcct gcccccagca |
| 3181 | ctcctctgtc tctgctcttg cctgcaccct tcctcctcct ttgcctagga ggccttctcg |
| 3241 | cattttctct agctgatcag aattttacca aaattcagaa catcctccaa ttccacagtc |
| 3301 | tctgggagac tttccctaag aggcgacttc ctctccagcc ttctctctct ggtcaggccc |
| 3361 | actgcagaga tggtggtgag cacatctggg aggctggtct ccctccagct ggaattgctg |
| 3421 | ctctctgagg gagaggctgt ggtggctgtc tctgtccctc actgccttcc aggagcaatt |
| 3481 | tgcacatgta acatagattt atgtaatgct ttatgtttaa aaacattccc caattatctt |
| 3541 | atttaatttt tgcaattatt ctaattttat atatagagaa agtgacctat tttttaaaaa |
| 3601 | aatcacactc taagttctat tgaacctagg acttgagcct ccatttctgg cttctagtct |
| 3661 | ggtgttctga gtacttgatt tcaggtcaat aacggtcccc cctcactcca cactggcacg |
| 3721 | tttgtgagaa gaaatgacat tttgctagga agtgaccgag tctaggaatg cttttattca |
| 3781 | agacaccaaa ttccaaactt ctaaatgttg gaattttcaa aaattgtgtt tagattttat |
| 3841 | gaaaaactct tctactttca tctattcttt ccctagaggc aaacatttct taaaatgttt |
| 3901 | cattttcatt aaaaatgaaa gccaaattta tatgccaccg attgcaggac acaagcacag |
| 3961 | ttttaagagt tgtatgaaca tggagaggac ttttggtttt tatatttctc gtatttaata |
| 4021 | tgggtgaaca ccaactttta tttggaataa taattttcct cctaaacaaa aacacattga |
| 4081 | gtttaagtct ctgactcttg cctttccacc tgctttctcc tgggcccgct ttgcctgctt |
| 4141 | gaaggaacag tgctgttctg gagctgctgt tccaacagac agggcctagc tttcatttga |
| 4201 | cacacagact acagccagaa gcccatggag cagggatgtc acgtcttgaa aagcctatta |
| 4261 | gatgttttac aaatttaatt ttgcagatta ttttagtctg tcatccagaa aatgtgtcag |
| 4321 | catgcatagt gctaagaaag caagccaatt tggaaactta ggttagtgac aaaattggcc |
| 4381 | agagagtggg ggtgatgatg accaagaatt acaagtagaa tggcagctgg aatttaagga |
| 4441 | gggacaagaa tcaatggata agcgtgggtg gaggaagatc caaacagaaa agtgcaaagt |
| 4501 | tattccccat cttccaaggg ttgaattctg gaggaagaag acacattcct agttccccgt |
| 4561 | gaacttcctt tgacttattg tccccactaa aacaaaacaa aaaactttta atgccttcca |
| 4621 | cattaattag attttcttgc agttttttta tggcattttt ttaaagatgc cctaagtgtt |
| 4681 | gaagaagagt ttgcaaatgc aacaaaatat ttaattaccg gttgttaaaa ctggtttagc |
| 4741 | acaatttata ttttccctct cttgcctttc ttatttgcaa taaaaggtat tgagccattt |
| 4801 | tttaaatgac atttttgata aattatgttt gtactagttg atgaaggagt tttttttaac |
| 4861 | ctgtttatat aattttgcag cagaagccaa attttttgta tattaaagca ccaaattcat |
| 4921 | gtacagcatg catcacggat caatagactg tacttatttt ccaataaaat tttcaaactt |
| 4981 | tgtactgtta aaaaaaaaaa aaaaaaa |
| Human IL-1R1 mRNA Variant 7 | |
| (SEQ ID NO: 110) | |
| 1 | gtagacgcac cctctgaaga tggtgactcc ctcctgagaa gctggacccc ttggtaaaag |
| 61 | acaaggcctt ctccaagata aatgcaagga acgtgaagaa aaaataattt tagtgtcatc |
| 121 | tgcaaatgaa attgatgttc gtccctgtcc tcttaaccca aatgaacaca aaggcactat |
| 181 | aacttggtat aaagatgaca gcaagacacc tgtatctaca gaacaagcct ccaggattca |
| 241 | tcaacacaaa gagaaacttt ggtttgttcc tgctaaggtg gaggattcag gacattacta |
| 301 | ttgcgtggta agaaattcat cttactgcct cagaattaaa ataagtgcaa aatttgtgga |
| 361 | gaatgagcct aacttatgtt ataatgcaca agccatattt aagcagaaac tacccgttgc |
| 421 | aggagacgga ggacttgtgt gcccttatat ggagtttttt aaaaatgaaa ataatgagtt |
| 481 | acctaaatta cagtggtata aggattgcaa acctctactt cttgacaata tacactttag |
| 541 | tggagtcaaa gataggctca tcgtgatgaa tgtggctgaa aagcatagag ggaactatac |
| 601 | ttgtcatgca tcctacacat acttgggcaa gcaatatcct attacccggg taatagaatt |
| 661 | tattactcta gaggaaaaca aacccacaag gcctgtgatt gtgagcccag ctaatgagac |
| 721 | aatggaagta gacttgggat cccagataca attgatctgt aatgtcaccg gccagttgag |
| 781 | tgacattgct tactggaagt ggaatgggtc agtaattgat gaagatgacc cagtgctagg |
| 841 | ggaagactat tacagtgtgg aaaatcctgc aaacaaaaga aggagtaccc tcatcacagt |
| 901 | gcttaatata tcggaaattg aaagtagatt ttataaacat ccatttacct gttttgccaa |
| 961 | gaatacacat ggtatagatg cagcatatat ccagttaata tatccagtca ctaatttcca |
| 1021 | gaagcacatg attggtatat gtgtcacgtt gacagtcata attgtgtgtt ctgttttcat |
| 1081 | ctataaaatc ttcaagattg acattgtgct ttggtacagg gattcctgct atgattttct |
| 1141 | cccaataaaa gcttcagatg gaaagaccta tgacgcatat atactgtatc caaagactgt |
| 1201 | tggggaaggg tctacctctg actgtgatat ttttgtgttt aaagtcttgc ctgaggtctt |
| 1261 | ggaaaaacag tgtggatata agctgttcat ttatggaagg gatgactacg ttggggaaga |
| 1321 | cattgttgag gtcattaatg aaaacgtaaa gaaaagcaga agactgatta tcattttagt |
| 1381 | cagagaaaca tcaggcttca gctggctggg tggttcatct gaagagcaaa tagccatgta |
| 1441 | taatgctctt gttcaggatg gaattaaagt tgtcctgctt gagctggaga aaatccaaga |
| 1501 | ctatgagaaa atgccagaat cgattaaatt cattaagcag aaacatgggg ctatccgctg |
| 1561 | gtcaggggac tttacacagg gaccacagtc tgcaaagaca aggttctgga agaatgtcag |
| 1621 | gtaccacatg ccagtccagc gacggtcacc ttcatctaaa caccagttac tgtcaccagc |
| 1681 | cactaaggag aaactgcaaa gagaggctca cgtgcctctc gggtagcatg gagaagttgc |
| 1741 | caagagttct ttaggtgcct cctgtcttat ggcgttgcag gccaggttat gcctcatgct |
| 1801 | gacttgcaga gttcatggaa tgtaactata tcatccttta tccctgaggt cacctggaat |
| 1861 | cagattatta agggaataag ccatgacgtc aatagcagcc cagggcactt cagagtagag |
| 1921 | ggcttgggaa gatcttttaa aaaggcagta ggcccggtgt ggtggctcac gcctataatc |
| 1981 | ccagcacttt gggaggctga agtgggtgga tcaccagagg tcaggagttc gagaccagcc |
| 2041 | cagccaacat ggcaaaaccc catctctact aaaaatacaa aaatgagcta ggcatggtgg |
| 2101 | cacacgcctg taatcccagc tacacctgag gctgaggcag gagaattgct tgaaccgggg |
| 2161 | agacggaggt tgcagtgagc cgagtttggg ccactgcact ctagcctggc aacagagcaa |
| 2221 | gactccgtct caaaaaaagg gcaataaatg ccctctctga atgtttgaac tgccaagaaa |
| 2281 | aggcatggag acagcgaact agaagaaagg gcaagaagga aatagccacc gtctacagat |
| 2341 | ggcttagtta agtcatccac agcccaaggg cggggctatg ccttgtctgg ggaccctgta |
| 2401 | gagtcactga ccctggagcg gctctcctga gaggtgctgc aggcaaagtg agactgacac |
| 2461 | ctcactgagg aagggagaca tattcttgga gaactttcca tctgcttgta ttttccatac |
| 2521 | acatccccag ccagaagtta gtgtccgaag accgaatttt attttacaga gcttgaaaac |
| 2581 | tcacttcaat gaacaaaggg attctccagg attccaaagt tttgaagtca tcttagcttt |
| 2641 | ccacaggagg gagagaactt aaaaaagcaa cagtagcagg gaattgatcc acttcttaat |
| 2701 | gctttcctcc ctggcatgac catcctgtcc tttgttatta tcctgcattt tacgtctttg |
| 2761 | gaggaacagc tccctagtgg cttcctccgt ctgcaatgtc ccttgcacag cccacacatg |
| 2821 | aaccatcctt cccatgatgc cgctcttctg tcatcccgct cctgctgaaa cacctcccag |
| 2881 | gggctccacc tgttcaggag ctgaagccca tgctttccca ccagcatgtc actcccagac |
| 2941 | cacctccctg ccctgtcctc cagcttcccc tcgctgtcct gctgtgtgaa ttcccaggtt |
| 3001 | ggcctggtgg ccatgtcgcc tgcccccagc actcctctgt ctctgctctt gcctgcaccc |
| 3061 | ttcctcctcc tttgcctagg aggccttctc gcattttctc tagctgatca gaattttacc |
| 3121 | aaaattcaga acatcctcca attccacagt ctctgggaga ctttccctaa gaggcgactt |
| 3181 | cctctccagc cttctctctc tggtcaggcc cactgcagag atggtggtga gcacatctgg |
| 3241 | gaggctggtc tccctccagc tggaattgct gctctctgag ggagaggctg tggtggctgt |
| 3301 | ctctgtccct cactgccttc caggagcaat ttgcacatgt aacatagatt tatgtaatgc |
| 3361 | tttatgttta aaaacattcc ccaattatct tatttaattt ttgcaattat tctaatttta |
| 3421 | tatatagaga aagtgaccta ttttttaaaa aaatcacact ctaagttcta ttgaacctag |
| 3481 | gacttgagcc tccatttctg gcttctagtc tggtgttctg agtacttgat ttcaggtcaa |
| 3541 | taacggtccc ccctcactcc acactggcac gtttgtgaga agaaatgaca ttttgctagg |
| 3601 | aagtgaccga gtctaggaat gcttttattc aagacaccaa attccaaact tctaaatgtt |
| 3661 | ggaattttca aaaattgtgt ttagatttta tgaaaaactc ttctactttc atctattctt |
| 3721 | tccctagagg caaacatttc ttaaaatgtt tcattttcat taaaaatgaa agccaaattt |
| 3781 | atatgccacc gattgcagga cacaagcaca gttttaagag ttgtatgaac atggagagga |
| 3841 | cttttggttt ttatatttct cgtatttaat atgggtgaac accaactttt atttggaata |
| 3901 | ataattttcc tcctaaacaa aaacacattg agtttaagtc tctgactctt gcctttccac |
| 3961 | ctgctttctc ctgggcccgc tttgcctgct tgaaggaaca gtgctgttct ggagctgctg |
| 4021 | ttccaacaga cagggcctag ctttcatttg acacacagac tacagccaga agcccatgga |
| 4081 | gcagggatgt cacgtcttga aaagcctatt agatgtttta caaatttaat tttgcagatt |
| 4141 | attttagtct gtcatccaga aaatgtgtca gcatgcatag tgctaagaaa gcaagccaat |
| 4201 | ttggaaactt aggttagtga caaaattggc cagagagtgg gggtgatgat gaccaagaat |
| 4261 | tacaagtaga atggcagctg gaatttaagg agggacaaga atcaatggat aagcgtgggt |
| 4321 | ggaggaagat ccaaacagaa aagtgcaaag ttattcccca tcttccaagg gttgaattct |
| 4381 | ggaggaagaa gacacattcc tagttccccg tgaacttcct ttgacttatt gtccccacta |
| 4441 | aaacaaaaca aaaaactttt aatgccttcc acattaatta gattttcttg cagttttttt |
| 4501 | atggcatttt tttaaagatg ccctaagtgt tgaagaagag tttgcaaatg caacaaaata |
| 4561 | tttaattacc ggttgttaaa actggtttag cacaatttat attttccctc tcttgccttt |
| 4621 | cttatttgca ataaaaggta ttgagccatt ttttaaatga catttttgat aaattatgtt |
| 4681 | tgtactagtt gatgaaggag ttttttttaa cctgtttata taattttgca gcagaagcca |
| 4741 | aattttttgt atattaaagc accaaattca tgtacagcat gcatcacgga tcaatagact |
| 4801 | gtacttattt tccaataaaa ttttcaaact ttgtactgtt aaaaaaaaaa aaaaaaaa |
| Human IL-1R1 mRNA Variant 8 | |
| (SEQ ID NO: 111) | |
| 1 | gtagacgcac cctctgaaga tggtgactcc ctcctgagaa gctggacccc ttggtaaaag |
| 61 | acaaggcctt ctccaagaag aatatgaaag tgttactcag acttatttgt ttcatagctc |
| 121 | tactgatttc ttctctggag gctgataaat gcaaggaacg tgaagaaaaa ataattttag |
| 181 | tgtcatctgc aaatgaaatt gatgttcgtc cctgtcctct taacccaaat gaacacaaag |
| 241 | gcactataac ttggtataaa gatgacagca agacacctgt atctacagaa caagcctcca |
| 301 | ggattcatca acacaaagag aaactttggt ttgttcctgc taaggtggag gattcaggac |
| 361 | attactattg cgtggtaagg attgcaaacc tctacttctt gacaatatac actttagtgg |
| 421 | agtcaaagat aggctcatcg tgatgaatgt ggctgaaaag catagaggga actatacttg |
| 481 | tcatgcatcc tacacatact tgggcaagca atatcctatt acccgggtaa tagaatttat |
| 541 | tactctagag gaaaacaaac ccacaaggcc tgtgattgtg agcccagcta atgagacaat |
| 601 | ggaagtagac ttgggatccc agatacaatt gatctgtaat gtcaccggcc agttgagtga |
| 661 | cattgcttac tggaagtgga atgggtcagt aattgatgaa gatgacccag tgctagggga |
| 721 | agactattac agtgtggaaa atcctgcaaa caaaagaagg agtaccctca tcacagtgct |
| 781 | taatatatcg gaaattgaaa gtagatttta taaacatcca tttacctgtt ttgccaagaa |
| 841 | tacacatggt atagatgcag catatatcca gttaatatat ccagtcacta atttccagaa |
| 901 | gcacatgatt ggtatatgtg tcacgttgac agtcataatt gtgtgttctg ttttcatcta |
| 961 | taaaatcttc aagattgaca ttgtgctttg gtacagggat tcctgctatg attttctccc |
| 1021 | aataaaagct tcagatggaa agacctatga cgcatatata ctgtatccaa agactgttgg |
| 1081 | ggaagggtct acctctgact gtgatatttt tgtgtttaaa gtcttgcctg aggtcttgga |
| 1141 | aaaacagtgt ggatataagc tgttcattta tggaagggat gactacgttg gggaagacat |
| 1201 | tgttgaggtc attaatgaaa acgtaaagaa aagcagaaga ctgattatca ttttagtcag |
| 1261 | agaaacatca ggcttcagct ggctgggtgg ttcatctgaa gagcaaatag ccatgtataa |
| 1321 | tgctcttgtt caggatggaa ttaaagttgt cctgcttgag ctggagaaaa tccaagacta |
| 1381 | tgagaaaatg ccagaatcga ttaaattcat taagcagaaa catggggcta tccgctggtc |
| 1441 | aggggacttt acacagggac cacagtctgc aaagacaagg ttctggaaga atgtcaggta |
| 1501 | ccacatgcca gtccagcgac ggtcaccttc atctaaacac cagttactgt caccagccac |
| 1561 | taaggagaaa ctgcaaagag aggctcacgt gcctctcggg tagcatggag aagttgccaa |
| 1621 | gagttcttta ggtgcctcct gtcttatggc gttgcaggcc aggttatgcc tcatgctgac |
| 1681 | ttgcagagtt catggaatgt aactatatca tcctttatcc ctgaggtcac ctggaatcag |
| 1741 | attattaagg gaataagcca tgacgtcaat agcagcccag ggcacttcag agtagagggc |
| 1801 | ttgggaagat cttttaaaaa ggcagtaggc ccggtgtggt ggctcacgcc tataatccca |
| 1861 | gcactttggg aggctgaagt gggtggatca ccagaggtca ggagttcgag accagcccag |
| 1921 | ccaacatggc aaaaccccat ctctactaaa aatacaaaaa tgagctaggc atggtggcac |
| 1981 | acgcctgtaa tcccagctac acctgaggct gaggcaggag aattgcttga accggggaga |
| 2041 | cggaggttgc agtgagccga gtttgggcca ctgcactcta gcctggcaac agagcaagac |
| 2101 | tccgtctcaa aaaaagggca ataaatgccc tctctgaatg tttgaactgc caagaaaagg |
| 2161 | catggagaca gcgaactaga agaaagggca agaaggaaat agccaccgtc tacagatggc |
| 2221 | ttagttaagt catccacagc ccaagggcgg ggctatgcct tgtctgggga ccctgtagag |
| 2281 | tcactgaccc tggagcggct ctcctgagag gtgctgcagg caaagtgaga ctgacacctc |
| 2341 | actgaggaag ggagacatat tcttggagaa ctttccatct gcttgtattt tccatacaca |
| 2401 | tccccagcca gaagttagtg tccgaagacc gaattttatt ttacagagct tgaaaactca |
| 2461 | cttcaatgaa caaagggatt ctccaggatt ccaaagtttt gaagtcatct tagctttcca |
| 2521 | caggagggag agaacttaaa aaagcaacag tagcagggaa ttgatccact tcttaatgct |
| 2581 | ttcctccctg gcatgaccat cctgtccttt gttattatcc tgcattttac gtctttggag |
| 2641 | gaacagctcc ctagtggctt cctccgtctg caatgtccct tgcacagccc acacatgaac |
| 2701 | catccttccc atgatgccgc tcttctgtca tcccgctcct gctgaaacac ctcccagggg |
| 2761 | ctccacctgt tcaggagctg aagcccatgc tttcccacca gcatgtcact cccagaccac |
| 2821 | ctccctgccc tgtcctccag cttcccctcg ctgtcctgct gtgtgaattc ccaggttggc |
| 2881 | ctggtggcca tgtcgcctgc ccccagcact cctctgtctc tgctcttgcc tgcacccttc |
| 2941 | ctcctccttt gcctaggagg ccttctcgca ttttctctag ctgatcagaa ttttaccaaa |
| 3001 | attcagaaca tcctccaatt ccacagtctc tgggagactt tccctaagag gcgacttcct |
| 3061 | ctccagcctt ctctctctgg tcaggcccac tgcagagatg gtggtgagca catctgggag |
| 3121 | gctggtctcc ctccagctgg aattgctgct ctctgaggga gaggctgtgg tggctgtctc |
| 3181 | tgtccctcac tgccttccag gagcaatttg cacatgtaac atagatttat gtaatgcttt |
| 3241 | atgtttaaaa acattcccca attatcttat ttaatttttg caattattct aattttatat |
| 3301 | atagagaaag tgacctattt tttaaaaaaa tcacactcta agttctattg aacctaggac |
| 3361 | ttgagcctcc atttctggct tctagtctgg tgttctgagt acttgatttc aggtcaataa |
| 3421 | cggtcccccc tcactccaca ctggcacgtt tgtgagaaga aatgacattt tgctaggaag |
| 3481 | tgaccgagtc taggaatgct tttattcaag acaccaaatt ccaaacttct aaatgttgga |
| 3541 | attttcaaaa attgtgttta gattttatga aaaactcttc tactttcatc tattctttcc |
| 3601 | ctagaggcaa acatttctta aaatgtttca ttttcattaa aaatgaaagc caaatttata |
| 3661 | tgccaccgat tgcaggacac aagcacagtt ttaagagttg tatgaacatg gagaggactt |
| 3721 | ttggttttta tatttctcgt atttaatatg ggtgaacacc aacttttatt tggaataata |
| 3781 | attttcctcc taaacaaaaa cacattgagt ttaagtctct gactcttgcc tttccacctg |
| 3841 | ctttctcctg ggcccgcttt gcctgcttga aggaacagtg ctgttctgga gctgctgttc |
| 3901 | caacagacag ggcctagctt tcatttgaca cacagactac agccagaagc ccatggagca |
| 3961 | gggatgtcac gtcttgaaaa gcctattaga tgttttacaa atttaatttt gcagattatt |
| 4021 | ttagtctgtc atccagaaaa tgtgtcagca tgcatagtgc taagaaagca agccaatttg |
| 4081 | gaaacttagg ttagtgacaa aattggccag agagtggggg tgatgatgac caagaattac |
| 4141 | aagtagaatg gcagctggaa tttaaggagg gacaagaatc aatggataag cgtgggtgga |
| 4201 | ggaagatcca aacagaaaag tgcaaagtta ttccccatct tccaagggtt gaattctgga |
| 4261 | ggaagaagac acattcctag ttccccgtga acttcctttg acttattgtc cccactaaaa |
| 4321 | caaaacaaaa aacttttaat gccttccaca ttaattagat tttcttgcag tttttttatg |
| 4381 | gcattttttt aaagatgccc taagtgttga agaagagttt gcaaatgcaa caaaatattt |
| 4441 | aattaccggt tgttaaaact ggtttagcac aatttatatt ttccctctct tgcctactt |
| 4501 | atttgcaata aaaggtattg agccattttt taaatgacat ttttgataaa ttatgtttgt |
| 4561 | actagttgat gaaggagttt tttttaacct gtttatataa ttttgcagca gaagccaaat |
| 4621 | tttttgtata ttaaagcacc aaattcatgt acagcatgca tcacggatca atagactgta |
| 4681 | cttattttcc aataaaattt tcaaactttg tactgttaaa aaaaaaaaaa aaaaa |
| Human IL-1R1 mRNA Variant 9 | |
| (SEQ ID NO: 112) | |
| 1 | gtagacgcac cctctgaaga tggtgactcc ctcctgagaa gctggacccc ttggtaaaag |
| 61 | acaaggcctt ctccaagaag aatatgaaag tgttactcag acttatttgt ttcatagctc |
| 121 | tactgatttc ttctctggag gctgataaat gcaaggaacg tgaagaaaaa ataattttag |
| 181 | tgtcatctgc aaatgaaatt gatgttcgtc cctgtcctct taacccaaat gaacacaaag |
| 241 | gcactataac ttggtataaa gatgacagca agacacctgt atctacagaa caagcctcca |
| 301 | ggattcatca acacaaagag aaactttggt ttgttcctgc taaggtggag gattcaggac |
| 361 | attactattg cgtggtaaga aattcatctt actgcctcag aattaaaata agtgcaaaat |
| 421 | ttgtggagaa tgagcctaac ttatgttata atgcacaagc catatttaag cagaaactac |
| 481 | ccgttgcagg agacggagga cttgtgtgcc cttatatgga gttttttaaa aatgaaaata |
| 541 | atgagttacc taaattacag tggtataaga ggaaaacaaa cccacaaggc ctgtgattgt |
| 601 | gagcccagct aatgagacaa tggaagtaga cttgggatcc cagatacaat tgatctgtaa |
| 661 | tgtcaccggc cagttgagtg acattgctta ctggaagtgg aatgggtcag taattgatga |
| 721 | agatgaccca gtgctagggg aagactatta cagtgtggaa aatcctgcaa acaaaagaag |
| 781 | gagtaccctc atcacagtgc ttaatatatc ggaaattgaa agtagatttt ataaacatcc |
| 841 | atttacctgt tttgccaaga atacacatgg tatagatgca gcatatatcc agttaatata |
| 901 | tccagtcact aatttccaga agcacatgat tggtatatgt gtcacgttga cagtcataat |
| 961 | tgtgtgttct gttttcatct ataaaatctt caagattgac attgtgcttt ggtacaggga |
| 1021 | ttcctgctat gattttctcc caataaaagc ttcagatgga aagacctatg acgcatatat |
| 1081 | actgtatcca aagactgttg gggaagggtc tacctctgac tgtgatattt ttgtgtttaa |
| 1141 | agtcttgcct gaggtcttgg aaaaacagtg tggatataag ctgttcattt atggaaggga |
| 1201 | tgactacgtt ggggaagaca ttgttgaggt cattaatgaa aacgtaaaga aaagcagaag |
| 1261 | actgattatc attttagtca gagaaacatc aggcttcagc tggctgggtg gttcatctga |
| 1321 | agagcaaata gccatgtata atgctcttgt tcaggatgga attaaagttg tcctgcttga |
| 1381 | gctggagaaa atccaagact atgagaaaat gccagaatcg attaaattca ttaagcagaa |
| 1441 | acatggggct atccgctggt caggggactt tacacaggga ccacagtctg caaagacaag |
| 1501 | gttctggaag aatgtcaggt accacatgcc agtccagcga cggtcacctt catctaaaca |
| 1561 | ccagttactg tcaccagcca ctaaggagaa actgcaaaga gaggctcacg tgcctctcgg |
| 1621 | gtagcatgga gaagttgcca agagttcttt aggtgcctcc tgtcttatgg cgttgcaggc |
| 1681 | caggttatgc ctcatgctga cttgcagagt tcatggaatg taactatatc atccatatc |
| 1741 | cctgaggtca cctggaatca gattattaag ggaataagcc atgacgtcaa tagcagccca |
| 1801 | gggcacttca gagtagaggg cttgggaaga tcttttaaaa aggcagtagg cccggtgtgg |
| 1861 | tggctcacgc ctataatccc agcactttgg gaggctgaag tgggtggatc accagaggtc |
| 1921 | aggagttcga gaccagccca gccaacatgg caaaacccca tctctactaa aaatacaaaa |
| 1981 | atgagctagg catggtggca cacgcctgta atcccagcta cacctgaggc tgaggcagga |
| 2041 | gaattgcttg aaccggggag acggaggttg cagtgagccg agtttgggcc actgcactct |
| 2101 | agcctggcaa cagagcaaga ctccgtctca aaaaaagggc aataaatgcc ctctctgaat |
| 2161 | gtttgaactg ccaagaaaag gcatggagac agcgaactag aagaaagggc aagaaggaaa |
| 2221 | tagccaccgt ctacagatgg cttagttaag tcatccacag cccaagggcg gggctatgcc |
| 2281 | ttgtctgggg accctgtaga gtcactgacc ctggagcggc tctcctgaga ggtgctgcag |
| 2341 | gcaaagtgag actgacacct cactgaggaa gggagacata ttcttggaga actttccatc |
| 2401 | tgcttgtatt ttccatacac atccccagcc agaagttagt gtccgaagac cgaattttat |
| 2461 | tttacagagc ttgaaaactc acttcaatga acaaagggat tctccaggat tccaaagttt |
| 2521 | tgaagtcatc ttagctttcc acaggaggga gagaacttaa aaaagcaaca gtagcaggga |
| 2581 | attgatccac ttcttaatgc tttcctccct ggcatgacca tcctgtcctt tgttattatc |
| 2641 | ctgcatttta cgtctttgga ggaacagctc cctagtggct tcctccgtct gcaatgtccc |
| 2701 | ttgcacagcc cacacatgaa ccatccttcc catgatgccg ctcttctgtc atcccgctcc |
| 2761 | tgctgaaaca cctcccaggg gctccacctg ttcaggagct gaagcccatg ctttcccacc |
| 2821 | agcatgtcac tcccagacca cctccctgcc ctgtcctcca gcttcccctc gctgtcctgc |
| 2881 | tgtgtgaatt cccaggttgg cctggtggcc atgtcgcctg cccccagcac tcctctgtct |
| 2941 | ctgctcttgc ctgcaccctt cctcctcctt tgcctaggag gccttctcgc attttctcta |
| 3001 | gctgatcaga attttaccaa aattcagaac atcctccaat tccacagtct ctgggagact |
| 3061 | ttccctaaga ggcgacttcc tctccagcct tctctctctg gtcaggccca ctgcagagat |
| 3121 | ggtggtgagc acatctggga ggctggtctc cctccagctg gaattgctgc tctctgaggg |
| 3181 | agaggctgtg gtggctgtct ctgtccctca ctgccttcca ggagcaattt gcacatgtaa |
| 3241 | catagattta tgtaatgctt tatgtttaaa aacattcccc aattatctta tttaattttt |
| 3301 | gcaattattc taattttata tatagagaaa gtgacctatt ttttaaaaaa atcacactct |
| 3361 | aagttctatt gaacctagga cttgagcctc catttctggc ttctagtctg gtgttctgag |
| 3421 | tacttgattt caggtcaata acggtccccc ctcactccac actggcacgt ttgtgagaag |
| 3481 | aaatgacatt ttgctaggaa gtgaccgagt ctaggaatgc ttttattcaa gacaccaaat |
| 3541 | tccaaacttc taaatgttgg aattttcaaa aattgtgttt agattttatg aaaaactctt |
| 3601 | ctactttcat ctattctttc cctagaggca aacatttctt aaaatgtttc attttcatta |
| 3661 | aaaatgaaag ccaaatttat atgccaccga ttgcaggaca caagcacagt tttaagagtt |
| 3721 | gtatgaacat ggagaggact tttggttttt atatttctcg tatttaatat gggtgaacac |
| 3781 | caacttttat ttggaataat aattttcctc ctaaacaaaa acacattgag tttaagtctc |
| 3841 | tgactcttgc ctttccacct gctttctcct gggcccgctt tgcctgcttg aaggaacagt |
| 3901 | gctgttctgg agctgctgtt ccaacagaca gggcctagct ttcatttgac acacagacta |
| 3961 | cagccagaag cccatggagc agggatgtca cgtcttgaaa agcctattag atgttttaca |
| 4021 | aatttaattt tgcagattat tttagtctgt catccagaaa atgtgtcagc atgcatagtg |
| 4081 | ctaagaaagc aagccaattt ggaaacttag gttagtgaca aaattggcca gagagtgggg |
| 4141 | gtgatgatga ccaagaatta caagtagaat ggcagctgga atttaaggag ggacaagaat |
| 4201 | caatggataa gcgtgggtgg aggaagatcc aaacagaaaa gtgcaaagtt attccccatc |
| 4261 | ttccaagggt tgaattctgg aggaagaaga cacattccta gttccccgtg aacttccttt |
| 4321 | gacttattgt ccccactaaa acaaaacaaa aaacttttaa tgccttccac attaattaga |
| 4381 | ttttcttgca gtttttttat ggcatttttt taaagatgcc ctaagtgttg aagaagagtt |
| 4441 | tgcaaatgca acaaaatatt taattaccgg ttgttaaaac tggtttagca caatttatat |
| 4501 | tttccctctc ttgcctttct tatttgcaat aaaaggtatt gagccatttt ttaaatgaca |
| 4561 | tttttgataa attatgtttg tactagttga tgaaggagtt ttttttaacc tgtttatata |
| 4621 | attttgcagc agaagccaaa ttttttgtat attaaagcac caaattcatg tacagcatgc |
| 4681 | atcacggatc aatagactgt acttattttc caataaaatt ttcaaacttt gtactgttaa |
| 4741 | aaaaaaaaaa aaaaaa |
| Human IL-1R1 mRNA Variant 10 | |
| (SEQ ID NO: 113) | |
| 1 | attaaagccc taagaggctg tgacacagcc atctccaaaa ccccactttc tccttccttt |
| 61 | gagcctccgt accagctggg gcgtccggca agatgtgagt tgtcactctg ctgcggcaca |
| 121 | gacctgaatt aacaactcta gctagggctg acttcaaaaa gcactttcgt tttttaataa |
| 181 | ccaacatcag ctcagcaggc ttcatttggg aaaagaaacc ttgtcggatt accccgacat |
| 241 | tctccacctc ctgggaggcc agccattccc aaatgcccca aggatgaaga acggagacgg |
| 301 | tagacgcacc ctctgaagat ggtgactccc tcctgagaag ctggacccct tggtaaaaga |
| 361 | caaggccttc tccaagaaga atatgaaagt gttactcaga cttatttgtt tcatagctct |
| 421 | actgatttct tctctggagg ctgataaatg caaggaacgt gaagaaaaaa taattttagt |
| 481 | gtcatctgca aatgaaattg atgttcgtcc ctgtcctctt aacccaaatg aacacaaagg |
| 541 | cactataact tggtataaag atgacagcaa gacacctgta tctacagaac aagcctccag |
| 601 | gattcatcaa cacaaagaga aactttggtt tgttcctgct aaggtggagg attcaggaca |
| 661 | ttactattgc gtggtaagaa attcatctta ctgcctcaga attaaaataa gtgcaaaatt |
| 721 | tgtggagaat gagcctaact tatgttataa tgcacaagcc atatttaagc agaaactacc |
| 781 | cgttgcagga gacggaggac ttgtgtgccc ttatatggag ttttttaaaa atgaaaataa |
| 841 | tgagttacct aaattacagt ggtataaggt aattttattt taaatatgac atttcacttt |
| 901 | tccagaaaat aaaatagttc cctggacaat agaaaaaaaa aaaaaaaaaa |
| Human IL1RAP mRNA Variant 1 | |
| (SEQ ID NO: 114) | |
| 1 | aaagggggaa aagaaagtgc ggcggaaagt aagaggctca ctggggaaga ctgccgggat |
| 61 | ccaggtctcc ggggtccgct ttggccagag gcgcggaagg aagcagtgcc cggcgacact |
| 121 | gcacccatcc cggctgcttt tgctgcgccc tctcagcttc ccaagaaagg catcgtcatg |
| 181 | tgatcatcac ctaagaacta gaacatcagc aggccctaga agcctcactc ttgcccctcc |
| 241 | ctttaatatc tcaaaggatg acacttctgt ggtgtgtagt gagtctctac ttttatggaa |
| 301 | tcctgcaaag tgatgcctca gaacgctgcg atgactgggg actagacacc atgaggcaaa |
| 361 | tccaagtgtt tgaagatgag ccagctcgca tcaagtgccc actctttgaa cacttcttga |
| 421 | aattcaacta cagcacagcc cattcagctg gccttactct gatctggtat tggactaggc |
| 481 | aggaccggga ccttgaggag ccaattaact tccgcctccc cgagaaccgc attagtaagg |
| 541 | agaaagatgt gctgtggttc cggcccactc tcctcaatga cactggcaac tatacctgca |
| 601 | tgttaaggaa cactacatat tgcagcaaag ttgcatttcc cttggaagtt gttcaaaaag |
| 661 | acagctgttt caattccccc atgaaactcc cagtgcataa actgtatata gaatatggca |
| 721 | ttcagaggat cacttgtcca aatgtagatg gatattttcc ttccagtgtc aaaccgacta |
| 781 | tcacttggta tatgggctgt tataaaatac agaattttaa taatgtaata cccgaaggta |
| 841 | tgaacttgag tttcctcatt gccttaattt caaataatgg aaattacaca tgtgttgtta |
| 901 | catatccaga aaatggacgt acgtttcatc tcaccaggac tctgactgta aaggtagtag |
| 961 | gctctccaaa aaatgcagtg ccccctgtga tccattcacc taatgatcat gtggtctatg |
| 1021 | agaaagaacc aggagaggag ctactcattc cctgtacggt ctattttagt tttctgatgg |
| 1081 | attctcgcaa tgaggtttgg tggaccattg atggaaaaaa acctgatgac atcactattg |
| 1141 | atgtcaccat taacgaaagt ataagtcata gtagaacaga agatgaaaca agaactcaga |
| 1201 | ttttgagcat caagaaagtt acctctgagg atctcaagcg cagctatgtc tgtcatgcta |
| 1261 | gaagtgccaa aggcgaagtt gccaaagcag ccaaggtgaa gcagaaagtg ccagctccaa |
| 1321 | gatacacagt ggaactggct tgtggttttg gagccacagt cctgctagtg gtgattctca |
| 1381 | ttgttgttta ccatgtttac tggctagaga tggtcctatt ttaccgggct cattttggaa |
| 1441 | cagatgaaac cattttagat ggaaaagagt atgatattta tgtatcctat gcaaggaatg |
| 1501 | cggaagaaga agaatttgta ttactgaccc tccgtggagt tttggagaat gaatttggat |
| 1561 | acaagctgtg catctttgac cgagacagtc tgcctggggg aattgtcaca gatgagactt |
| 1621 | tgagcttcat tcagaaaagc agacgcctcc tggttgttct aagccccaac tacgtgctcc |
| 1681 | agggaaccca agccctcctg gagctcaagg ctggcctaga aaatatggcc tctcggggca |
| 1741 | acatcaacgt cattttagta cagtacaaag ctgtgaagga aacgaaggtg aaagagctga |
| 1801 | agagggctaa gacggtgctc acggtcatta aatggaaagg ggaaaaatcc aagtatccac |
| 1861 | agggcaggtt ctggaagcag ctgcaggtgg ccatgccagt gaagaaaagt cccaggcggt |
| 1921 | ctagcagtga tgagcagggc ctctcgtatt catctttgaa aaatgtatga aaggaataat |
| 1981 | gaaaagggta aaaagaacaa ggggtgctcc aggaagaaag agtcccccca gtcttcattc |
| 2041 | gcagtttatg gtttcatagg caaaaataat ggtctaagcc tcccaatagg gataaattta |
| 2101 | gggtgactgt gtggctgact attctgcttc ctcaggcaac actaaagttt agaaagatat |
| 2161 | catcaacgtt ctgtcaccag tctctgatgc cactatgttc tttgcaggca aagacttgtt |
| 2221 | caatgcgaat ttccccttct acattgtcta tccctgtttt tatatgtctc cattcttttt |
| 2281 | aaaatcttaa catatggagc agcctttcct atgaatttaa atatgccttt aaaataagtc |
| 2341 | actgttgaca gggtcatgag tttccgagta tagttttctt tttatcttat ttttactcgt |
| 2401 | ccgttgaaaa gataatcaag gcctacattt tagctgagga taatgaactt ttttcctcat |
| 2461 | tcggctgtat aatacataac cacagcaaga ctgacatcca cttaggatga tacaaagcag |
| 2521 | tgtaactgaa aatgtttctt ttaattgatt taaaggactt gtcttctata ccacccttgt |
| 2581 | cctcatctca ggtaatttat gaaatctatg taaacttgaa aaatatttct taatttttgt |
| 2641 | ttttgctcca gtcaattcct gattatccac aggtcaaccc acattttttc attccttctc |
| 2701 | cctatctgct tatatcgcat tgctcattta gagtttgcag gaggctccat actaggttca |
| 2761 | gtctgaaaga aatctcctaa tggtgctata gagagggagg taacagaaag actcttttag |
| 2821 | ggcatttttc tgactcatga aaagagcaca gaaaaggatg tttggcaatt tgtcttttaa |
| 2881 | gtcttaacct tgctaatgtg aatactggga aagtgatttt ttctcactcg tttttgttgc |
| 2941 | tccattgtaa agggcggagg tcagtcttag tggccttgag agttgctttt ggcattaata |
| 3001 | ttctaagaga attaactgta tttcctgtca cctattcact agtgcaggaa atatacttgc |
| 3061 | tccaaataag tcagtatgag aagtcactgt caatgaaagt tgttttgttt gttttcagta |
| 3121 | atattttgct gtttttaaga cttggaaaac taagtgcaga gtttacagag tggtaaatat |
| 3181 | ctatgttaca tgtagattat acatatatat acacacgtgt atatgagata tatatcttat |
| 3241 | atctccacaa acacaaatta tatatataca tatccacaca catacattac atatatctgt |
| 3301 | gtatataaat ccacatgcac atgaaatata tatatatata taatttgtgt gtgtgtatgt |
| 3361 | gtatgtatat gactttaaat agctatgggt acaatattaa aaaccactgg aactcttgtc |
| 3421 | cagtttttaa attatgtttt tactggaatg tttttgtgtc agtgttttct gtacatatta |
| 3481 | tttgttaatt cacagctcac agagtgatag ttgtcatagt tcttgccttc cctaagttta |
| 3541 | tataaataac ttaagtattg ctacagttta tctaggttgc agtggcatct gctgtgcaca |
| 3601 | gagcttccat ggtcactgct aagcagtagc cagccatcgg gcattaattg atttcctact |
| 3661 | atattcccag cagacacatt tagaaactaa gctatgttaa cctcagtgct caactatttg |
| 3721 | aactgttgag tgataaagga aacaaatata actgtaaatg aatcttggta tcctgtgaaa |
| 3781 | cagaataatt cgtaatttaa gaaagccctt atcccggtaa catgaatgtt gatgaacaaa |
| 3841 | tgtaaaatta tatcctatat ttaagtaccc ataataaatc atttccctct ataagtgtta |
| 3901 | ttgattattt taaattgaaa aaagtttcac ttggatgaaa aaagtagaaa agtaggtcat |
| 3961 | tcttggatct actttttttt agccttatta atatttttcc ctattagaaa ccacaattac |
| 4021 | tccctctatt aacccttcac ttactagacc agaaaagaac ttattccaga taagctttga |
| 4081 | atatcaattc ttacataaac tttaggcaaa cagggaatag tctagtcacc aaaggaccat |
| 4141 | tctcttgcca atgctgcatt ccttttgcac ttttggattc catatttatc ccaaatgctg |
| 4201 | ttgggcaccc ctagaaatac cttgatgttt tttctattta tatgcctgcc tttggtactt |
| 4261 | aattttacaa atgctgtaat ataaagcata tcaagtttat gtgatacgta tcattgcaag |
| 4321 | agaatttgtt tcaagatttt tttttaatgt tccagaagat ggccaataga gaacattcaa |
| 4381 | gggaaatggg gaaacataat ttagagaaca agaacaaacc atgtctcaaa tttttttaaa |
| 4441 | aaaaattaat ggttttaaat atatgctata gggacgttcc atgcccaggt taacaaagaa |
| 4501 | ctgtgatata tagagtgtct aattacaaaa tcatatacga tttatttaat tctcttctgt |
| 4561 | attgtaactt agatgattcc caaggactct aataaaaaat cacttcattg tatttggaaa |
| 4621 | caaaaacatc attcattaat tacttatttt ctttccatag gttttaatat tttgagagtg |
| 4681 | tcttttttat ttcattcatg aacttttgta tttttcattt ttcatttgat ttgtaaattt |
| 4741 | acttatgtta aaaataaacc atttattttc agctttgaat tttaaaaaaa aaaaaaaaaa |
| 4801 | a |
| Human IL1RAP mRNA Variant 2 | |
| (SEQ ID NO: 115) | |
| 1 | aaagggggaa aagaaagtgc ggcggaaagt aagaggctca ctggggaaga ctgccgggat |
| 61 | ccaggtctcc ggggtccgct ttggccagag gcgcggaagg aagcagtgcc cggcgacact |
| 121 | gcacccatcc cggctgcttt tgctgcgccc tctcagcttc ccaagaaagg catcgtcatg |
| 181 | tgatcatcac ctaagaacta gaacatcagc aggccctaga agcctcactc ttgcccctcc |
| 241 | ctttaatatc tcaaaggatg acacttctgt ggtgtgtagt gagtctctac ttttatggaa |
| 301 | tcctgcaaag tgatgcctca gaacgctgcg atgactgggg actagacacc atgaggcaaa |
| 361 | tccaagtgtt tgaagatgag ccagctcgca tcaagtgccc actctttgaa cacttcttga |
| 421 | aattcaacta cagcacagcc cattcagctg gccttactct gatctggtat tggactaggc |
| 481 | aggaccggga ccttgaggag ccaattaact tccgcctccc cgagaaccgc attagtaagg |
| 541 | agaaagatgt gctgtggttc cggcccactc tcctcaatga cactggcaac tatacctgca |
| 601 | tgttaaggaa cactacatat tgcagcaaag ttgcatttcc cttggaagtt gttcaaaaag |
| 661 | acagctgttt caattccccc atgaaactcc cagtgcataa actgtatata gaatatggca |
| 721 | ttcagaggat cacttgtcca aatgtagatg gatattttcc ttccagtgtc aaaccgacta |
| 781 | tcacttggta tatgggctgt tataaaatac agaattttaa taatgtaata cccgaaggta |
| 841 | tgaacttgag tttcctcatt gccttaattt caaataatgg aaattacaca tgtgttgtta |
| 901 | catatccaga aaatggacgt acgtttcatc tcaccaggac tctgactgta aaggtagtag |
| 961 | gctctccaaa aaatgcagtg ccccctgtga tccattcacc taatgatcat gtggtctatg |
| 1021 | agaaagaacc aggagaggag ctactcattc cctgtacggt ctattttagt tttctgatgg |
| 1081 | attctcgcaa tgaggtttgg tggaccattg atggaaaaaa acctgatgac atcactattg |
| 1141 | atgtcaccat taacgaaagt ataagtcata gtagaacaga agatgaaaca agaactcaga |
| 1201 | ttttgagcat caagaaagtt acctctgagg atctcaagcg cagctatgtc tgtcatgcta |
| 1261 | gaagtgccaa aggcgaagtt gccaaagcag ccaaggtgaa gcagaaaggt aatagatgcg |
| 1321 | gtcagtgatg aatctctcag ctccaaatta acattgtggt gaataaggac aaaaggagag |
| 1381 | attgagaaca agagagctcc agcacctagc ccgacggcat ctaacccata gtaatgaatc |
| 1441 | aaacttaaat gaaaaatatg aaagttttca tctatgtaag atactcaaaa tattgtttct |
| 1501 | gatattgtta gtaccgtaat gcccaaatgt agctaaaaaa atcgacgtga gtacagtgag |
| 1561 | acacaatttt gtgtctgtac aattatgaaa aattaaaaac aaagaaaata ttcaaagcta |
| 1621 | ccaaagatag aaaaaactgg tagagccaca tattgttggt gaattattaa gaccctttta |
| 1681 | aaaatcattc atggtagact tcaagagtca taaaaaagat tgcatcatct gacctaagac |
| 1741 | tttcggaatt tttcctgaac aaataacaga aagggaatta tatacctttt aatattatta |
| 1801 | gaagcattat ctgtagttgt aaaacattat taatagcagc catccaattg tatgcaacta |
| 1861 | attaaggtat tgaatgttta ttttccaaaa atgcataatt ataatattat tttaaacact |
| 1921 | atgtatcaat atttaagcag gtttataata taccagcagc cacaattgct aaaatgaaaa |
| 1981 | tcatttaaat tatgatttta aatggtataa acatgatttc tatgttgata gtactatatt |
| 2041 | attctacaat aaatggaaat tataaagcct tcttgtcaga agtgctgctc ctaaaaaaaa |
| 2101 | aaaaaaaaaa aaaa |
| Human IL1RAP mRNA Variant 3 | |
| (SEQ ID NO: 116) | |
| 1 | aaagggggaa aagaaagtgc ggcggaaagt aagaggctca ctggggaaga ctgccgggat |
| 61 | ccaggtctcc ggggtccgct ttggccagag gcgcggaagg aagcagtgcc cggcgacact |
| 121 | gcacccatcc cggctgcttt tgctgcgccc tctcagcttc ccaagaaagg gctttgacct |
| 181 | gaagcttgaa attgagtttg ggacaataat gtgtctcatg gggaattgca tggactcctt |
| 241 | atcataagcc aaatgctgag gtaaagctgc ggaattgagt cgtcctccaa gaagggagag |
| 301 | aaaatgatgt cttgtgacat ttccagataa ctggcatcgt catgtgatca tcacctaaga |
| 361 | actagaacat cagcaggccc tagaagcctc actcttgccc ctccctttaa tatctcaaag |
| 421 | gatgacactt ctgtggtgtg tagtgagtct ctacttttat ggaatcctgc aaagtgatgc |
| 481 | ctcagaacgc tgcgatgact ggggactaga caccatgagg caaatccaag tgtttgaaga |
| 541 | tgagccagct cgcatcaagt gcccactctt tgaacacttc ttgaaattca actacagcac |
| 601 | agcccattca gctggcctta ctctgatctg gtattggact aggcaggacc gggaccttga |
| 661 | ggagccaatt aacttccgcc tccccgagaa ccgcattagt aaggagaaag atgtgctgtg |
| 721 | gttccggccc actctcctca atgacactgg caactatacc tgcatgttaa ggaacactac |
| 781 | atattgcagc aaagttgcat ttcccttgga agttgttcaa aaagacagct gtttcaattc |
| 841 | ccccatgaaa ctcccagtgc ataaactgta tatagaatat ggcattcaga ggatcacttg |
| 901 | tccaaatgta gatggatatt ttccttccag tgtcaaaccg actatcactt ggtatatggg |
| 961 | ctgttataaa atacagaatt ttaataatgt aatacccgaa ggtatgaact tgagtttcct |
| 1021 | cattgcctta atttcaaata atggaaatta cacatgtgtt gttacatatc cagaaaatgg |
| 1081 | acgtacgttt catctcacca ggactctgac tgtaaaggta gtaggctctc caaaaaatgc |
| 1141 | agtgccccct gtgatccatt cacctaatga tcatgtggtc tatgagaaag aaccaggaga |
| 1201 | ggagctactc attccctgta cggtctattt tagttttctg atggattctc gcaatgaggt |
| 1261 | ttggtggacc attgatggaa aaaaacctga tgacatcact attgatgtca ccattaacga |
| 1321 | aagtataagt catagtagaa cagaagatga aacaagaact cagattttga gcatcaagaa |
| 1381 | agttacctct gaggatctca agcgcagcta tgtctgtcat gctagaagtg ccaaaggcga |
| 1441 | agttgccaaa gcagccaagg tgaagcagaa agtgccagct ccaagataca cagtggaact |
| 1501 | ggcttgtggt tttggagcca cagtcctgct agtggtgatt ctcattgttg tttaccatgt |
| 1561 | ttactggcta gagatggtcc tattttaccg ggctcatttt ggaacagatg aaaccatttt |
| 1621 | agatggaaaa gagtatgata tttatgtatc ctatgcaagg aatgcggaag aagaagaatt |
| 1681 | tgtattactg accctccgtg gagttttgga gaatgaattt ggatacaagc tgtgcatctt |
| 1741 | tgaccgagac agtctgcctg ggggaattgt cacagatgag actttgagct tcattcagaa |
| 1801 | aagcagacgc ctcctggttg ttctaagccc caactacgtg ctccagggaa cccaagccct |
| 1861 | cctggagctc aaggctggcc tagaaaatat ggcctctcgg ggcaacatca acgtcatttt |
| 1921 | agtacagtac aaagctgtga aggaaacgaa ggtgaaagag ctgaagaggg ctaagacggt |
| 1981 | gctcacggtc attaaatgga aaggggaaaa atccaagtat ccacagggca ggttctggaa |
| 2041 | gcagctgcag gtggccatgc cagtgaagaa aagtcccagg cggtctagca gtgatgagca |
| 2101 | gggcctctcg tattcatctt tgaaaaatgt atgaaaggaa taatgaaaag ggtaaaaaga |
| 2161 | acaaggggtg ctccaggaag aaagagtccc cccagtcttc attcgcagtt tatggtttca |
| 2221 | taggcaaaaa taatggtcta agcctcccaa tagggataaa tttagggtga ctgtgtggct |
| 2281 | gactattctg cttcctcagg caacactaaa gtttagaaag atatcatcaa cgttctgtca |
| 2341 | ccagtctctg atgccactat gttctttgca ggcaaagact tgttcaatgc gaatttcccc |
| 2401 | ttctacattg tctatccctg tttttatatg tctccattct ttttaaaatc ttaacatatg |
| 2461 | gagcagcctt tcctatgaat ttaaatatgc ctttaaaata agtcactgtt gacagggtca |
| 2521 | tgagtttccg agtatagttt tctttttatc ttatttttac tcgtccgttg aaaagataat |
| 2581 | caaggcctac attttagctg aggataatga acttttttcc tcattcggct gtataataca |
| 2641 | taaccacagc aagactgaca tccacttagg atgatacaaa gcagtgtaac tgaaaatgtt |
| 2701 | tcttttaatt gatttaaagg acttgtcttc tataccaccc ttgtcctcat ctcaggtaat |
| 2761 | ttatgaaatc tatgtaaact tgaaaaatat ttcttaattt ttgtttttgc tccagtcaat |
| 2821 | tcctgattat ccacaggtca acccacattt tttcattcct tctccctatc tgcttatatc |
| 2881 | gcattgctca tttagagttt gcaggaggct ccatactagg ttcagtctga aagaaatctc |
| 2941 | ctaatggtgc tatagagagg gaggtaacag aaagactctt ttagggcatt tttctgactc |
| 3001 | atgaaaagag cacagaaaag gatgtttggc aatttgtctt ttaagtctta accttgctaa |
| 3061 | tgtgaatact gggaaagtga ttttttctca ctcgtttttg ttgctccatt gtaaagggcg |
| 3121 | gaggtcagtc ttagtggcct tgagagttgc ttttggcatt aatattctaa gagaattaac |
| 3181 | tgtatttcct gtcacctatt cactagtgca ggaaatatac ttgctccaaa taagtcagta |
| 3241 | tgagaagtca ctgtcaatga aagttgtttt gtttgttttc agtaatattt tgctgttttt |
| 3301 | aagacttgga aaactaagtg cagagtttac agagtggtaa atatctatgt tacatgtaga |
| 3361 | ttatacatat atatacacac gtgtatatga gatatatatc ttatatctcc acaaacacaa |
| 3421 | attatatata tacatatcca cacacataca ttacatatat ctgtgtatat aaatccacat |
| 3481 | gcacatgaaa tatatatata tatataattt gtgtgtgtgt atgtgtatgt atatgacttt |
| 3541 | aaatagctat gggtacaata ttaaaaacca ctggaactct tgtccagttt ttaaattatg |
| 3601 | tttttactgg aatgtttttg tgtcagtgtt ttctgtacat attatttgtt aattcacagc |
| 3661 | tcacagagtg atagttgtca tagttcttgc cttccctaag tttatataaa taacttaagt |
| 3721 | attgctacag tttatctagg ttgcagtggc atctgctgtg cacagagctt ccatggtcac |
| 3781 | tgctaagcag tagccagcca tcgggcatta attgatttcc tactatattc ccagcagaca |
| 3841 | catttagaaa ctaagctatg ttaacctcag tgctcaacta tttgaactgt tgagtgataa |
| 3901 | aggaaacaaa tataactgta aatgaatctt ggtatcctgt gaaacagaat aattcgtaat |
| 3961 | ttaagaaagc ccttatcccg gtaacatgaa tgttgatgaa caaatgtaaa attatatcct |
| 4021 | atatttaagt acccataata aatcatttcc ctctataagt gttattgatt attttaaatt |
| 4081 | gaaaaaagtt tcacttggat gaaaaaagta gaaaagtagg tcattcttgg atctactttt |
| 4141 | ttttagcctt attaatattt ttccctatta gaaaccacaa ttactccctc tattaaccct |
| 4201 | tcacttacta gaccagaaaa gaacttattc cagataagct ttgaatatca attcttacat |
| 4261 | aaactttagg caaacaggga atagtctagt caccaaagga ccattctctt gccaatgctg |
| 4321 | cattcctttt gcacttttgg attccatatt tatcccaaat gctgttgggc acccctagaa |
| 4381 | ataccttgat gttttttcta tttatatgcc tgcctttggt acttaatttt acaaatgctg |
| 4441 | taatataaag catatcaagt ttatgtgata cgtatcattg caagagaatt tgtttcaaga |
| 4501 | ttttttttta atgttccaga agatggccaa tagagaacat tcaagggaaa tggggaaaca |
| 4561 | taatttagag aacaagaaca aaccatgtct caaatttttt taaaaaaaat taatggtttt |
| 4621 | aaatatatgc tatagggacg ttccatgccc aggttaacaa agaactgtga tatatagagt |
| 4681 | gtctaattac aaaatcatat acgatttatt taattctctt ctgtattgta acttagatga |
| 4741 | ttcccaagga ctctaataaa aaatcacttc attgtatttg gaaacaaaaa catcattcat |
| 4801 | taattactta ttttctttcc ataggtttta atattttgag agtgtctttt ttatttcatt |
| 4861 | catgaacttt tgtatttttc atttttcatt tgatttgtaa atttacttat gttaaaaata |
| 4921 | aaccatttat tttcagcttt gaattttaaa aaaaaaaaaa aaaaa |
| Human IL1RAP mRNA Variant 4 | |
| (SEQ ID NO: 117) | |
| 1 | aaagggggaa aagaaagtgc ggcggaaagt aagaggctca ctggggaaga ctgccgggat |
| 61 | ccaggtctcc ggggtccgct ttggccagag gcgcggaagg aagcagtgcc cggcgacact |
| 121 | gcacccatcc cggctgcttt tgctgcgccc tctcagcttc ccaagaaagg atgacacttc |
| 181 | tgtggtgtgt agtgagtctc tacttttatg gaatcctgca aagtgatgcc tcagaacgct |
| 241 | gcgatgactg gggactagac accatgaggc aaatccaagt gtttgaagat gagccagctc |
| 301 | gcatcaagtg cccactcttt gaacacttct tgaaattcaa ctacagcaca gcccattcag |
| 361 | ctggccttac tctgatctgg tattggacta ggcaggaccg ggaccttgag gagccaatta |
| 421 | acttccgcct ccccgagaac cgcattagta aggagaaaga tgtgctgtgg ttccggccca |
| 481 | ctctcctcaa tgacactggc aactatacct gcatgttaag gaacactaca tattgcagca |
| 541 | aagttgcatt tcccttggaa gttgttcaaa aagacagctg tttcaattcc cccatgaaac |
| 601 | tcccagtgca taaactgtat atagaatatg gcattcagag gatcacttgt ccaaatgtag |
| 661 | atggatattt tccttccagt gtcaaaccga ctatcacttg gtatatgggc tgttataaaa |
| 721 | tacagaattt taataatgta atacccgaag gtatgaactt gagtttcctc attgccttaa |
| 781 | tttcaaataa tggaaattac acatgtgttg ttacatatcc agaaaatgga cgtacgtttc |
| 841 | atctcaccag gactctgact gtaaaggtag taggctctcc aaaaaatgca gtgccccctg |
| 901 | tgatccattc acctaatgat catgtggtct atgagaaaga accaggagag gagctactca |
| 961 | ttccctgtac ggtctatttt agttttctga tggattctcg caatgaggtt tggtggacca |
| 1021 | ttgatggaaa aaaacctgat gacatcacta ttgatgtcac cattaacgaa agtataagtc |
| 1081 | atagtagaac agaagatgaa acaagaactc agattttgag catcaagaaa gttacctctg |
| 1141 | aggatctcaa gcgcagctat gtctgtcatg ctagaagtgc caaaggcgaa gttgccaaag |
| 1201 | cagccaaggt gaagcagaaa gtgccagctc caagatacac agtggaactg gcttgtggtt |
| 1261 | ttggagccac agtcctgcta gtggtgattc tcattgttgt ttaccatgtt tactggctag |
| 1321 | agatggtcct attttaccgg gctcattttg gaacagatga aaccatttta gatggaaaag |
| 1381 | agtatgatat ttatgtatcc tatgcaagga atgcggaaga agaagaattt gtattactga |
| 1441 | ccctccgtgg agttttggag aatgaatttg gatacaagct gtgcatcttt gaccgagaca |
| 1501 | gtctgcctgg gggaattgtc acagatgaga ctttgagctt cattcagaaa agcagacgcc |
| 1561 | tcctggttgt tctaagcccc aactacgtgc tccagggaac ccaagccctc ctggagctca |
| 1621 | aggctggcct agaaaatatg gcctctcggg gcaacatcaa cgtcatttta gtacagtaca |
| 1681 | aagctgtgaa ggaaacgaag gtgaaagagc tgaagagggc taagacggtg ctcacggtca |
| 1741 | ttaaatggaa aggggaaaaa tccaagtatc cacagggcag gttctggaag cagctgcagg |
| 1801 | tggccatgcc agtgaagaaa agtcccaggc ggtctagcag tgatgagcag ggcctctcgt |
| 1861 | attcatcttt gaaaaatgta tgaaaggaat aatgaaaagg gtaaaaagaa caaggggtgc |
| 1921 | tccaggaaga aagagtcccc ccagtcttca ttcgcagttt atggtttcat aggcaaaaat |
| 1981 | aatggtctaa gcctcccaat agggataaat ttagggtgac tgtgtggctg actattctgc |
| 2041 | ttcctcaggc aacactaaag tttagaaaga tatcatcaac gttctgtcac cagtctctga |
| 2101 | tgccactatg ttctttgcag gcaaagactt gttcaatgcg aatttcccct tctacattgt |
| 2161 | ctatccctgt ttttatatgt ctccattctt tttaaaatct taacatatgg agcagccttt |
| 2221 | cctatgaatt taaatatgcc tttaaaataa gtcactgttg acagggtcat gagtttccga |
| 2281 | gtatagtttt ctttttatct tatttttact cgtccgttga aaagataatc aaggcctaca |
| 2341 | ttttagctga ggataatgaa cttttttcct cattcggctg tataatacat aaccacagca |
| 2401 | agactgacat ccacttagga tgatacaaag cagtgtaact gaaaatgttt cttttaattg |
| 2461 | atttaaagga cttgtcttct ataccaccct tgtcctcatc tcaggtaatt tatgaaatct |
| 2521 | atgtaaactt gaaaaatatt tcttaatttt tgtttttgct ccagtcaatt cctgattatc |
| 2581 | cacaggtcaa cccacatttt ttcattcctt ctccctatct gcttatatcg cattgctcat |
| 2641 | ttagagtttg caggaggctc catactaggt tcagtctgaa agaaatctcc taatggtgct |
| 2701 | atagagaggg aggtaacaga aagactcttt tagggcattt ttctgactca tgaaaagagc |
| 2761 | acagaaaagg atgtttggca atttgtcttt taagtcttaa ccttgctaat gtgaatactg |
| 2821 | ggaaagtgat tttttctcac tcgtttttgt tgctccattg taaagggcgg aggtcagtct |
| 2881 | tagtggcctt gagagttgct tttggcatta atattctaag agaattaact gtatttcctg |
| 2941 | tcacctattc actagtgcag gaaatatact tgctccaaat aagtcagtat gagaagtcac |
| 3001 | tgtcaatgaa agttgttttg tttgttttca gtaatatttt gctgttttta agacttggaa |
| 3061 | aactaagtgc agagtttaca gagtggtaaa tatctatgtt acatgtagat tatacatata |
| 3121 | tatacacacg tgtatatgag atatatatct tatatctcca caaacacaaa ttatatatat |
| 3181 | acatatccac acacatacat tacatatatc tgtgtatata aatccacatg cacatgaaat |
| 3241 | atatatatat atataatttg tgtgtgtgta tgtgtatgta tatgacttta aatagctatg |
| 3301 | ggtacaatat taaaaaccac tggaactctt gtccagtttt taaattatgt ttttactgga |
| 3361 | atgtttttgt gtcagtgttt tctgtacata ttatttgtta attcacagct cacagagtga |
| 3421 | tagttgtcat agttcttgcc ttccctaagt ttatataaat aacttaagta ttgctacagt |
| 3481 | ttatctaggt tgcagtggca tctgctgtgc acagagcttc catggtcact gctaagcagt |
| 3541 | agccagccat cgggcattaa ttgatttcct actatattcc cagcagacac atttagaaac |
| 3601 | taagctatgt taacctcagt gctcaactat ttgaactgtt gagtgataaa ggaaacaaat |
| 3661 | ataactgtaa atgaatcttg gtatcctgtg aaacagaata attcgtaatt taagaaagcc |
| 3721 | cttatcccgg taacatgaat gttgatgaac aaatgtaaaa ttatatccta tatttaagta |
| 3781 | cccataataa atcatttccc tctataagtg ttattgatta ttttaaattg aaaaaagttt |
| 3841 | cacttggatg aaaaaagtag aaaagtaggt cattcttgga tctacttttt tttagcctta |
| 3901 | ttaatatttt tccctattag aaaccacaat tactccctct attaaccctt cacttactag |
| 3961 | accagaaaag aacttattcc agataagctt tgaatatcaa ttcttacata aactttaggc |
| 4021 | aaacagggaa tagtctagtc accaaaggac cattctcttg ccaatgctgc attccttttg |
| 4081 | cacttttgga ttccatattt atcccaaatg ctgttgggca cccctagaaa taccttgatg |
| 4141 | ttttttctat ttatatgcct gcctttggta cttaatttta caaatgctgt aatataaagc |
| 4201 | atatcaagtt tatgtgatac gtatcattgc aagagaattt gtttcaagat ttttttttaa |
| 4261 | tgttccagaa gatggccaat agagaacatt caagggaaat ggggaaacat aatttagaga |
| 4321 | acaagaacaa accatgtctc aaattttttt aaaaaaaatt aatggtttta aatatatgct |
| 4381 | atagggacgt tccatgccca ggttaacaaa gaactgtgat atatagagtg tctaattaca |
| 4441 | aaatcatata cgatttattt aattctcttc tgtattgtaa cttagatgat tcccaaggac |
| 4501 | tctaataaaa aatcacttca ttgtatttgg aaacaaaaac atcattcatt aattacttat |
| 4561 | tttctttcca taggttttaa tattttgaga gtgtcttttt tatttcattc atgaactttt |
| 4621 | gtatttttca tttttcattt gatttgtaaa tttacttatg ttaaaaataa accatttatt |
| 4681 | ttcagctttg aattttaaaa aaaaaaaaaa aaaa |
| Human IL1RAP mRNA Variant 5 | |
| (SEQ ID NO: 118) | |
| 1 | aaagggggaa aagaaagtgc ggcggaaagt aagaggctca ctggggaaga ctgccgggat |
| 61 | ccaggtctcc ggggtccgct ttggccagag gcgcggaagg aagcagtgcc cggcgacact |
| 121 | gcacccatcc cggctgcttt tgctgcgccc tctcagcttc ccaagaaagg atgacacttc |
| 181 | tgtggtgtgt agtgagtctc tacttttatg gaatcctgca aagtgatgcc tcagaacgct |
| 241 | gcgatgactg gggactagac accatgaggc aaatccaagt gtttgaagat gagccagctc |
| 301 | gcatcaagtg cccactcttt gaacacttct tgaaattcaa ctacagcaca gcccattcag |
| 361 | ctggccttac tctgatctgg tattggacta ggcaggaccg ggaccttgag gagccaatta |
| 421 | acttccgcct ccccgagaac cgcattagta aggagaaaga tgtgctgtgg ttccggccca |
| 481 | ctctcctcaa tgacactggc aactatacct gcatgttaag gaacactaca tattgcagca |
| 541 | aagttgcatt tcccttggaa gttgttcaaa aagacagctg tttcaattcc cccatgaaac |
| 601 | tcccagtgca taaactgtat atagaatatg gcattcagag gatcacttgt ccaaatgtag |
| 661 | atggatattt tccttccagt gtcaaaccga ctatcacttg gtatatgggc tgttataaaa |
| 721 | tacagaattt taataatgta atacccgaag gtatgaactt gagtttcctc attgccttaa |
| 781 | tttcaaataa tggaaattac acatgtgttg ttacatatcc agaaaatgga cgtacgtttc |
| 841 | atctcaccag gactctgact gtaaaggtag taggctctcc aaaaaatgca gtgccccctg |
| 901 | tgatccattc acctaatgat catgtggtct atgagaaaga accaggagag gagctactca |
| 961 | ttccctgtac ggtctatttt agttttctga tggattctcg caatgaggtt tggtggacca |
| 1021 | ttgatggaaa aaaacctgat gacatcacta ttgatgtcac cattaacgaa agtataagtc |
| 1081 | atagtagaac agaagatgaa acaagaactc agattttgag catcaagaaa gttacctctg |
| 1141 | aggatctcaa gcgcagctat gtctgtcatg ctagaagtgc caaaggcgaa gttgccaaag |
| 1201 | cagccaaggt gaagcagaaa ggtaatagat gcggtcagtg atgaatctct cagctccaaa |
| 1261 | ttaacattgt ggtgaataag gacaaaagga gagattgaga acaagagagc tccagcacct |
| 1321 | agcccgacgg catctaaccc atagtaatga atcaaactta aatgaaaaat atgaaagttt |
| 1381 | tcatctatgt aagatactca aaatattgtt tctgatattg ttagtaccgt aatgcccaaa |
| 1441 | tgtagctaaa aaaatcgacg tgagtacagt gagacacaat tttgtgtctg tacaattatg |
| 1501 | aaaaattaaa aacaaagaaa atattcaaag ctaccaaaga tagaaaaaac tggtagagcc |
| 1561 | acatattgtt ggtgaattat taagaccctt ttaaaaatca ttcatggtag acttcaagag |
| 1621 | tcataaaaaa gattgcatca tctgacctaa gactttcgga atttttcctg aacaaataac |
| 1681 | agaaagggaa ttatatacct tttaatatta ttagaagcat tatctgtagt tgtaaaacat |
| 1741 | tattaatagc agccatccaa ttgtatgcaa ctaattaagg tattgaatgt ttattttcca |
| 1801 | aaaatgcata attataatat tattttaaac actatgtatc aatatttaag caggtttata |
| 1861 | atataccagc agccacaatt gctaaaatga aaatcattta aattatgatt ttaaatggta |
| 1921 | taaacatgat ttctatgttg atagtactat attattctac aataaatgga aattataaag |
| 1981 | ccttcttgtc agaagtgctg ctcctaaaaa aaaaaaaaaa aaaaaaa |
| Human IL1RAP mRNA Variant 6 | |
| (SEQ ID NO: 119) | |
| 1 | aaagggggaa aagaaagtgc ggcggaaagt aagaggctca ctggggaaga ctgccgggat |
| 61 | ccaggtctcc ggggtccgct ttggccagag gcgcggaagg aagcagtgcc cggcgacact |
| 121 | gcacccatcc cggctgcttt tgctgcgccc tctcagcttc ccaagaaagg catcgtcatg |
| 181 | tgatcatcac ctaagaacta gaacatcagc aggccctaga agcctcactc ttgcccctcc |
| 241 | ctttaatatc tcaaaggatg acacttctgt ggtgtgtagt gagtctctac ttttatggaa |
| 301 | tcctgcaaag tgatgcctca gaacgctgcg atgactgggg actagacacc atgaggcaaa |
| 361 | tccaagtgtt tgaagatgag ccagctcgca tcaagtgccc actctttgaa cacttcttga |
| 421 | aattcaacta cagcacagcc cattcagctg gccttactct gatctggtat tggactaggc |
| 481 | aggaccggga ccttgaggag ccaattaact tccgcctccc cgagaaccgc attagtaagg |
| 541 | agaaagatgt gctgtggttc cggcccactc tcctcaatga cactggcaac tatacctgca |
| 601 | tgttaaggaa cactacatat tgcagcaaag ttgcatttcc cttggaagtt gttcaaaaag |
| 661 | acagctgttt caattccccc atgaaactcc cagtgcataa actgtatata gaatatggca |
| 721 | ttcagaggat cacttgtcca aatgtagatg gatattttcc ttccagtgtc aaaccgacta |
| 781 | tcacttggta tatgggctgt tataaaatac agaattttaa taatgtaata cccgaaggta |
| 841 | tgaacttgag tttcctcatt gccttaattt caaataatgg aaattacaca tgtgttgtta |
| 901 | catatccaga aaatggacgt acgtttcatc tcaccaggac tctgactgta aaggtagtag |
| 961 | gctctccaaa aaatgcagtg ccccctgtga tccattcacc taatgatcat gtggtctatg |
| 1021 | agaaagaacc aggagaggag ctactcattc cctgtacggt ctattttagt tttctgatgg |
| 1081 | attctcgcaa tgaggtttgg tggaccattg atggaaaaaa acctgatgac atcactattg |
| 1141 | atgtcaccat taacgaaagt ataagtcata gtagaacaga agatgaaaca agaactcaga |
| 1201 | ttttgagcat caagaaagtt acctctgagg atctcaagcg cagctatgtc tgtcatgcta |
| 1261 | gaagtgccaa aggcgaagtt gccaaagcag ccaaggtgaa gcagaaagtg ccagctccaa |
| 1321 | gatacacagt ggaactggct tgtggttttg gagccacagt cctgctagtg gtgattctca |
| 1381 | ttgttgttta ccatgtttac tggctagaga tggtcctatt ttaccgggct cattttggaa |
| 1441 | cagatgaaac cattttagat ggaaaagagt atgatattta tgtatcctat gcaaggaatg |
| 1501 | cggaagaaga agaatttgta ttactgaccc tccgtggagt tttggagaat gaatttggat |
| 1561 | acaagctgtg catctttgac cgagacagtc tgcctggggg aaatacagtg gaagcagttt |
| 1621 | ttgatttcat tcagagaagc agaaggatga ttgttgttct gagccctgac tatgtgacag |
| 1681 | aaaagagcat cagcatgctg gagtttaaac tgggtgtcat gtgccagaac tccattgcca |
| 1741 | ccaagctcat tgtggttgag taccgtcccc ttgagcaccc gcacccaggc attcttcagc |
| 1801 | tcaaagagtc tgtgtctttt gtgagctgga agggagaaaa gtccaaacat tctggctcta |
| 1861 | aattctggaa agctttgcgg ttggctcttc ccctgagaag tctgagtgcc agttctggct |
| 1921 | ggaatgagag ctgctcttcc cagtctgaca tcagtctgga tcacgttcaa aggaggagaa |
| 1981 | gtcgtttgaa agagccccca gaacttcaga gctcagagag ggctgcaggt agccctccag |
| 2041 | ccccaggcac aatgtccaag caccgaggga agtcctccgc cacctgccgc tgttgtgtca |
| 2101 | cctactgtga aggagagaat caccttagga acaagagccg ggcagagatt cataaccagc |
| 2161 | cccagtggga gacacacctc tgtaagcctg ttccccaaga gtcagaaact caatggatac |
| 2221 | aaaatggcac cagattggaa ccccctgctc cccagatctc agcccttgct cttcatcatt |
| 2281 | tcacggactt atccaataac aacgactttt atatcctata attactgtgt gtggtgggtg |
| 2341 | gtggctacta tctctaccaa ccctctgtat gtcatgaacc tgtgggaaaa tctgacattt |
| 2401 | ttatcatcta atggactatc agatttctgt cccctttatt gatttttaaa aactatttat |
| 2461 | ttctaggaga caaaagacct gaaggacctg aatccagaat tattgcctct aaaggcctca |
| 2521 | gaagagcaca ctcttcttgg gccctagaag gtcagtatgt gaaagttgcc taaagtctga |
| 2581 | tcctctatct tgtccaatgg tttaaaactg agctaagaat ttaaatgtgt ttcttttcag |
| 2641 | tgagttgatc aacctcacat tataagtcag tcaggtgtac ttgggctatg atgcttacag |
| 2701 | ggtgtatgca ttcccaggga gcagcatgga aaggagctgg ttctggtgga agctgtagga |
| 2761 | cgaagctcaa cagaaaacct acagcacatt tttcctcaaa gaaccaaaca tacccaccca |
| 2821 | gggatacatg gcgttctctg tctcactgta aactagtgtt ctctaaactg cctaacattg |
| 2881 | ttagcatcaa taaaattcta tttttacgtc aaaaaaaaaa aaaaaaaaaa |
| Human IL-18Rα mRNA Variant 1 | |
| (SEQ ID NO: 120) | |
| 1 | tcaggaggcg gagatcgctg cttctcacct actttctgaa cttggcctcc gcagtcgcga |
| 61 | cctggcgtga aggaggagct gccgcccccg ccccagcctc ggggacgcct ctctgaagag |
| 121 | aagccatttg aagcagaatc caaaccatga attgtagaga attacccttg accctttggg |
| 181 | tgcttatatc tgtaagcact gcagaatctt gtacttcacg tccccacatt actgtggttg |
| 241 | aaggggaacc tttctatctg aaacattgct cgtgttcact tgcacatgag attgaaacaa |
| 301 | ccaccaaaag ctggtacaaa agcagtggat cacaggaaca tgtggagctg aacccaagga |
| 361 | gttcctcgag aattgctttg catgattgtg ttttggagtt ttggccagtt gagttgaatg |
| 421 | acacaggatc ttactttttc caaatgaaaa attatactca gaaatggaaa ttaaatgtca |
| 481 | tcagaagaaa taaacacagc tgtttcactg aaagacaagt aactagtaaa attgtggaag |
| 541 | ttaaaaaatt ttttcagata acctgtgaaa acagttacta tcaaacactg gtcaacagca |
| 601 | catcattgta taagaactgt aaaaagctac tactggagaa caataaaaac ccaacgataa |
| 661 | agaagaacgc cgagtttgaa gatcaggggt attactcctg cgtgcatttc cttcatcata |
| 721 | atggaaaact atttaatatc accaaaacct tcaatataac aatagtggaa gatcgcagta |
| 781 | atatagttcc ggttcttctt ggaccaaagc ttaaccatgt tgcagtggaa ttaggaaaaa |
| 841 | acgtaaggct caactgctct gctttgctga atgaagagga tgtaatttat tggatgttcg |
| 901 | gggaagaaaa tggatcggat cctaatatac atgaagagaa agaaatgaga attatgactc |
| 961 | cagaaggcaa atggcatgct tcaaaagtat tgagaattga aaatattggt gaaagcaatc |
| 1021 | taaatgtttt atataattgc actgtggcca gcacgggagg cacagacacc aaaagcttca |
| 1081 | tcttggtgag aaaagcagac atggctgata tcccaggcca cgtcttcaca agaggaatga |
| 1141 | tcatagctgt tttgatcttg gtggcagtag tgtgcctagt gactgtgtgt gtcatttata |
| 1201 | gagttgactt ggttctattt tatagacatt taacgagaag agatgaaaca ttaacagatg |
| 1261 | gaaaaacata tgatgctttt gtgtcttacc taaaagaatg ccgacctgaa aatggagagg |
| 1321 | agcacacctt tgctgtggag attttgccca gggtgttgga gaaacatttt gggtataagt |
| 1381 | tatgcatatt tgaaagggat gtagtgcctg gaggagctgt tgttgatgaa atccactcac |
| 1441 | tgatagagaa aagccgaaga ctaatcattg tcctaagtaa aagttatatg tctaatgagg |
| 1501 | tcaggtatga acttgaaagt ggactccatg aagcattggt ggaaagaaaa attaaaataa |
| 1561 | tcttaattga atttacacct gttactgact tcacattctt gccccaatca ctaaagcttt |
| 1621 | tgaaatctca cagagttctg aagtggaagg ccgataaatc tctttcttat aactcaaggt |
| 1681 | tctggaagaa ccttctttac ttaatgcctg caaaaacagt caagccaggt agagacgaac |
| 1741 | cggaagtctt gcctgttctt tccgagtctt aatcttcaga aacagtgaac gccaaaaaga |
| 1801 | actcaagata ttctggggac tgagcatatg aacctgttca taacaaaggc tgtgactcga |
| 1861 | aataattaac tttgtcaaaa tcctgctcac aatttgaaga tgaaacttgt cattaggttg |
| 1921 | gcgggaatga gactaaagat tgcgctgtgg gctgtggtca cgtgctccca gaagacctgg |
| 1981 | aattcaaaag aaatggagct attctttttc tccctctttc ataactggat gcagctgctc |
| 2041 | atactcaatc ccatattcag caagtgtgaa gctggacgtg atgcaaaata accgatgccc |
| 2101 | tacaaaaagg gcgcatcttt aagagtttta atgccagtgc ttaattcgaa tgaggggatt |
| 2161 | ttaagtgtct gaagaggcat tttctaggga ccagtgggtg actgagtaac tgaaatgctg |
| 2221 | ctttcactcc ctaacaccat ggatctggtt gtgcatagga tgtgggagga ggggctggca |
| 2281 | gggccgcctt cagaggctgc agggcctcag cctcaggatg catttaatgt atcctggcca |
| 2341 | cagttgcagc caacggttct tgaaagctcg gtaaggccct gcaacgcaga gcctgcttat |
| 2401 | gtggatctat ttatgggaac ttcttaaaag gaccccagaa tagctcttta tctttcacaa |
| 2461 | gagacacaaa ttctaattga gttaattatc tgggcctttc actttggatg ctctgaaaca |
| 2521 | tttgttgatt ttgtgtgaat gtttatatca aaatgtttgc caggttgtat tagccattga |
| 2581 | atagcaaaaa actgatagtt acttgcttgt tttttaaaaa ttacatatta aaaatgccct |
| 2641 | tggcataagg cagcatggtg tggcagttaa gagatgggct gtgcagccca tcctgagctc |
| 2701 | cagtcctgag tttgctactt acttctgtgg cctctggaac cttatccaac ctcttggtgc |
| 2761 | ttcagtttcc tcatctgtga aattagaatt tataataatt gcacctacct cccaggggta |
| 2821 | actaaatgaa taaatataat aaagtactta cagtggttcc tgacacagac tcagcactcc |
| 2881 | gtcagtgttg ccatgactat ttttattatc attattaatg attacttaga tcaattattt |
| 2941 | agcagtggac taatggaagc tacagagcag ggaagggaag cagatctagg gaggaaggca |
| 3001 | gttttgattt gaggaggttt gcacatgtag agaagcatac tggagaagca tatccagagg |
| 3061 | gcgaaagata tctctccatt gtgcatctgc ctcttttgac gttggaagac acatgtctta |
| 3121 | ctccccaaag ggagcccagc actgggagcc ttcttgatga tctcaaaaat aatagctatt |
| 3181 | caagaaaatc accaagtgac tgtgaaaccg tcagttcgga aggctggtta gaacatgtgg |
| 3241 | gagcaacatg aatgttctac aaaagtttaa agcagagatt gtttcaaatg ggtgtagtag |
| 3301 | atattactga aaaccaaaaa agagtgagat tgtcagtgta agaatgtgat ttaatgtttg |
| 3361 | tagtgcttac aattttgtgt accaactgga tgactaaaaa gagtaaaata atttaattaa |
| 3421 | tagctcatat tttatgtgtg aaaacatgtt agtgaacata tataatcaaa atagatttca |
| 3481 | ttgctattgc atagtctcta atacatagaa tgattttgct tttctctttt attatacttg |
| 3541 | ctttaaaata cttgaaatat attttgcatt aaatgcattt caagttaaat gtcttaaatg |
| 3601 | tatacattag atgtgtgttt taaaatgcat aaaacacgtt gaaatacatt aatgaaccat |
| 3661 | t |
| Human IL-18Rα mRNA Variant 2 | |
| (SEQ ID NO: 121) | |
| 1 | tcaggaggcg gagatcgctg cttctcacct actttctgaa cttggcctcc gcagtcgcga |
| 61 | cctggcgtga aggaggagct gccgcccccg ccccagcctc ggggacgcct ctctgaagag |
| 121 | aagccatttg aagcagaatc caaaccatga attgtagaga attacccttg accctttggg |
| 181 | tgcttatatc tgtaagcact gcagaaatta tactcagaaa tggaaattaa atgtcatcag |
| 241 | aagaaataaa cacagctgtt tcactgaaag acaagtaact agtaaaattg tggaagttaa |
| 301 | aaaatttttt cagataacct gtgaaaacag ttactatcaa acactggtca acagcacatc |
| 361 | attgtataag ataggaccac ctatttgcag gaaaacaagc tcagggctcc actgattcta |
| 421 | cattatgaac tgtaaaaagc tactactgga gaacaataaa aacccaacga taaagaagaa |
| 481 | cgccgagttt gaagatcagg ggtattactc ctgcgtgcat ttccttcatc ataatggaaa |
| 541 | actatttaat atcaccaaaa ccttcaatat aacaatagtg gaagatcgca gtaatatagt |
| 601 | tccggttctt cttggaccaa agcttaacca tgttgcagtg gaattaggaa aaaacgtaag |
| 661 | gctcaactgc tctgctttgc tgaatgaaga ggatgtaatt tattggatgt tcggggaaga |
| 721 | aaatggatcg gatcctaata tacatgaaga gaaagaaatg agaattatga ctccagaagg |
| 781 | caaatggcat gcttcaaaag tattgagaat tgaaaatatt ggtgaaagca atctaaatgt |
| 841 | tttatataat tgcactgtgg ccagcacggg aggcacagac accaaaagct tcatcttggt |
| 901 | gagaaaagac atggctgata tcccaggcca cgtcttcaca agaggaatga tcatagctgt |
| 961 | tttgatcttg gtggcagtag tgtgcctagt gactgtgtgt gtcatttata gagttgactt |
| 1021 | ggttctattt tatagacatt taacgagaag agatgaaaca ttaacagatg gaaaaacata |
| 1081 | tgatgctttt gtgtcttacc taaaagaatg ccgacctgaa aatggagagg agcacacctt |
| 1141 | tgctgtggag attttgccca gggtgttgga gaaacatttt gggtataagt tatgcatatt |
| 1201 | tgaaagggat gtagtgcctg gaggagctgt tgttgatgaa atccactcac tgatagagaa |
| 1261 | aagccgaaga ctaatcattg tcctaagtaa aagttatatg tctaatgagg tcaggtatga |
| 1321 | acttgaaagt ggactccatg aagcattggt ggaaagaaaa attaaaataa tcttaattga |
| 1381 | atttacacct gttactgact tcacattctt gccccaatca ctaaagcttt tgaaatctca |
| 1441 | cagagttctg aagtggaagg ccgataaatc tctttcttat aactcaaggt tctggaagaa |
| 1501 | ccttctttac ttaatgcctg caaaaacagt caagccaggt agagacgaac cggaagtctt |
| 1561 | gcctgttctt tccgagtctt aatcttcaga aacagtgaac gccaaaaaga actcaagata |
| 1621 | ttctggggac tgagcatatg aacctgttca taacaaaggc tgtgactcga aataattaac |
| 1681 | tttgtcaaaa tcctgctcac aatttgaaga tgaaacttgt cattaggttg gcgggaatga |
| 1741 | gactaaagat tgcgctgtgg gctgtggtca cgtgctccca gaagacctgg aattcaaaag |
| 1801 | aaatggagct attctttttc tccctctttc ataactggat gcagctgctc atactcaatc |
| 1861 | ccatattcag caagtgtgaa gctggacgtg atgcaaaata accgatgccc tacaaaaagg |
| 1921 | gcgcatcttt aagagtttta atgccagtgc ttaattcgaa tgaggggatt ttaagtgtct |
| 1981 | gaagaggcat tttctaggga ccagtgggtg actgagtaac tgaaatgctg ctttcactcc |
| 2041 | ctaacaccat ggatctggtt gtgcatagga tgtgggagga ggggctggca gggccgcctt |
| 2101 | cagaggctgc agggcctcag cctcaggatg catttaatgt atcctggcca cagttgcagc |
| 2161 | caacggttct tgaaagctcg gtaaggccct gcaacgcaga gcctgcttat gtggatctat |
| 2221 | ttatgggaac ttcttaaaag gaccccagaa tagctcttta tctttcacaa gagacacaaa |
| 2281 | ttctaattga gttaattatc tgggcctttc actttggatg ctctgaaaca tttgttgatt |
| 2341 | ttgtgtgaat gtttatatca aaatgtttgc caggttgtat tagccattga atagcaaaaa |
| 2401 | actgatagtt acttgcttgt tttttaaaaa ttacatatta aaaatgccct tggcataagg |
| 2461 | cagcatggtg tggcagttaa gagatgggct gtgcagccca tcctgagctc cagtcctgag |
| 2521 | tttgctactt acttctgtgg cctctggaac cttatccaac ctcttggtgc ttcagtttcc |
| 2581 | tcatctgtga aattagaatt tataataatt gcacctacct cccaggggta actaaatgaa |
| 2641 | taaatataat aaagtactta cagtggttcc tgacacagac tcagcactcc gtcagtgttg |
| 2701 | ccatgactat ttttattatc attattaatg attacttaga tcaattattt agcagtggac |
| 2761 | taatggaagc tacagagcag ggaagggaag cagatctagg gaggaaggca gttttgattt |
| 2821 | gaggaggttt gcacatgtag agaagcatac tggagaagca tatccagagg gcgaaagata |
| 2881 | tctctccatt gtgcatctgc ctcttttgac gttggaagac acatgtctta ctccccaaag |
| 2941 | ggagcccagc actgggagcc ttcttgatga tctcaaaaat aatagctatt caagaaaatc |
| 3001 | accaagtgac tgtgaaaccg tcagttcgga aggctggtta gaacatgtgg gagcaacatg |
| 3061 | aatgttctac aaaagtttaa agcagagatt gtttcaaatg ggtgtagtag atattactga |
| 3121 | aaaccaaaaa agagtgagat tgtcagtgta agaatgtgat ttaatgtttg tagtgcttac |
| 3181 | aattttgtgt accaactgga tgactaaaaa gagtaaaata atttaattaa tagctcatat |
| 3241 | tttatgtgtg aaaacatgtt agtgaacata tataatcaaa atagatttca ttgctattgc |
| 3301 | atagtctcta atacatagaa tgattttgct tttctctttt attatacttg ctttaaaata |
| 3361 | cttgaaatat attttgcatt aaatgcattt caagttaaat gtcttaaatg tatacattag |
| 3421 | atgtgtgttt taaaatgcat aaaacacgtt gaaatacatt aatgaaccat t |
| Human IL-1RL2 mRNA | |
| (SEQ ID NO: 122) | |
| 1 | cccgcccacg gtggcgggga aatacctagg catggaagtg gcatgacagg gctcgtgtcc |
| 61 | ctgtcatatt ttccactctc cacgaggtcc tgcgcgcttc aatcctgcag gcagcccggt |
| 121 | ttggggatgt ggtccttgct gctctgcggg ttgtccatcg cccttccact gtctgtcaca |
| 181 | gcagatggat gcaaggacat ttttatgaaa aatgagatac tttcagcaag ccagcctttt |
| 241 | gcttttaatt gtacattccc tcccataaca tctggggaag tcagtgtaac atggtataaa |
| 301 | aattctagca aaatcccagt gtccaaaatc atacagtcta gaattcacca ggacgagact |
| 361 | tggattttgt ttctccccat ggaatggggg gactcaggag tctaccaatg tgttataaag |
| 421 | ggtagagaca gctgtcatag aatacatgta aacctaactg tttttgaaaa acattggtgt |
| 481 | gacacttcca taggtggttt accaaattta tcagatgagt acaagcaaat attacatctt |
| 541 | ggaaaagatg atagtctcac atgtcatctg cacttcccga agagttgtgt tttgggtcca |
| 601 | ataaagtggt ataaggactg taacgagatt aaaggggagc ggttcactgt tttggaaacc |
| 661 | aggcttttgg tgagcaatgt ctcggcagag gacagaggga actacgcgtg tcaagccata |
| 721 | ctgacacact cagggaagca gtacgaggtt ttaaatggca tcactgtgag cattacagaa |
| 781 | agagctggat atggaggaag tgtccctaaa atcatttatc caaaaaatca ttcaattgaa |
| 841 | gtacagcttg gtaccactct gattgtggac tgcaatgtaa cagacaccaa ggataataca |
| 901 | aatctacgat gctggagagt caataacact ttggtggatg attactatga tgaatccaaa |
| 961 | cgaatcagag aaggggtgga aacccatgtc tcttttcggg aacataattt gtacacagta |
| 1021 | aacatcacct tcttggaagt gaaaatggaa gattatggcc ttcctttcat gtgccacgct |
| 1081 | ggagtgtcca cagcatacat tatattacag ctcccagctc cggattttcg agcttacttg |
| 1141 | ataggagggc ttatcgcctt ggtggctgtg gctgtgtctg ttgtgtacat atacaacatt |
| 1201 | tttaagatcg acattgttct ttggtatcga agtgccttcc attctacaga gaccatagta |
| 1261 | gatgggaagc tgtatgacgc ctatgtctta taccccaagc cccacaagga aagccagagg |
| 1321 | catgccgtgg atgccctggt gttgaatatc ctgcccgagg tgttggagag acaatgtgga |
| 1381 | tataagttgt ttatattcgg cagagatgaa ttccctggac aagccgtggc caatgtcatc |
| 1441 | gatgaaaacg ttaagctgtg caggaggctg attgtcattg tggtccccga atcgctgggc |
| 1501 | tttggcctgt tgaagaacct gtcagaagaa caaatcgcgg tctacagtgc cctgatccag |
| 1561 | gacgggatga aggttattct cattgagctg gagaaaatcg aggactacac agtcatgcca |
| 1621 | gagtcaattc agtacatcaa acagaagcat ggtgccatcc ggtggcatgg ggacttcacg |
| 1681 | gagcagtcac agtgtatgaa gaccaagttt tggaagacag tgagatacca catgccgccc |
| 1741 | agaaggtgtc ggccgtttcc tccggtccag ctgctgcagc acacaccttg ctaccgcacc |
| 1801 | gcaggcccag aactaggctc aagaagaaag aagtgtactc tcacgactgg ctaagacttg |
| 1861 | ctggactgac acctatggct ggaagatgac ttgttttgct ccatgtctcc tcattcctac |
| 1921 | acctattttc tgctgcagga tgaggctagg gttagcattc taga |
| Human IL1RL1 mRNA Variant 1 | |
| (SEQ ID NO: 123) | |
| 1 | aaagagaggc tggctgttgt atttagtaaa gctataaagc tgtaagagaa attggctttc |
| 61 | tgagttgtga aactgtgggc agaaagttga ggaagaaaga actcaagtac aacccaatga |
| 121 | ggttgagata taggctactc ttcccaactc agtcttgaag agtatcacca actgcctcat |
| 181 | gtgtggtgac cttcactgtc gtatgccagt gactcatctg gagtaatctc aacaacgagt |
| 241 | taccaatact tgctcttgat tgataaacag aatggggttt tggatcttag caattctcac |
| 301 | aattctcatg tattccacag cagcaaagtt tagtaaacaa tcatggggcc tggaaaatga |
| 361 | ggctttaatt gtaagatgtc ctagacaagg aaaacctagt tacaccgtgg attggtatta |
| 421 | ctcacaaaca aacaaaagta ttcccactca ggaaagaaat cgtgtgtttg cctcaggcca |
| 481 | acttctgaag tttctaccag ctgcagttgc tgattctggt atttatacct gtattgtcag |
| 541 | aagtcccaca ttcaatagga ctggatatgc gaatgtcacc atatataaaa aacaatcaga |
| 601 | ttgcaatgtt ccagattatt tgatgtattc aacagtatct ggatcagaaa aaaattccaa |
| 661 | aatttattgt cctaccattg acctctacaa ctggacagca cctcttgagt ggtttaagaa |
| 721 | ttgtcaggct cttcaaggat caaggtacag ggcgcacaag tcatttttgg tcattgataa |
| 781 | tgtgatgact gaggacgcag gtgattacac ctgtaaattt atacacaatg aaaatggagc |
| 841 | caattatagt gtgacggcga ccaggtcctt cacggtcaag gatgagcaag gcttttctct |
| 901 | gtttccagta atcggagccc ctgcacaaaa tgaaataaag gaagtggaaa ttggaaaaaa |
| 961 | cgcaaaccta acttgctctg cttgttttgg aaaaggcact cagttcttgg ctgccgtcct |
| 1021 | gtggcagctt aatggaacaa aaattacaga ctttggtgaa ccaagaattc aacaagagga |
| 1081 | agggcaaaat caaagtttca gcaatgggct ggcttgtcta gacatggttt taagaatagc |
| 1141 | tgacgtgaag gaagaggatt tattgctgca gtacgactgt ctggccctga atttgcatgg |
| 1201 | cttgagaagg cacaccgtaa gactaagtag gaaaaatcca attgatcatc atagcatcta |
| 1261 | ctgcataatt gcagtatgta gtgtattttt aatgctaatc aatgtcctgg ttatcatcct |
| 1321 | aaaaatgttc tggattgagg ccactctgct ctggagagac atagctaaac cttacaagac |
| 1381 | taggaatgat ggaaagctct atgatgctta tgttgtctac ccacggaact acaaatccag |
| 1441 | tacagatggg gccagtcgtg tagagcactt tgttcaccag attctgcctg atgttcttga |
| 1501 | aaataaatgt ggctatacct tatgcattta tgggagagat atgctacctg gagaagatgt |
| 1561 | agtcactgca gtggaaacca acatacgaaa gagcaggcgg cacattttca tcctgacccc |
| 1621 | tcagatcact cacaataagg agtttgccta cgagcaggag gttgccctgc actgtgccct |
| 1681 | catccagaac gacgccaagg tgatacttat tgagatggag gctctgagcg agctggacat |
| 1741 | gctgcaggct gaggcgcttc aggactccct ccagcatctt atgaaagtac aggggaccat |
| 1801 | caagtggagg gaggaccaca ttgccaataa aaggtccctg aattctaaat tctggaagca |
| 1861 | cgtgaggtac caaatgcctg tgccaagcaa aattcccaga aaggcctcta gtttgactcc |
| 1921 | cttggctgcc cagaagcaat agtgcctgct gtgatgtgca aaggcatctg agtttgaagc |
| 1981 | tttcctgact tctcctagct ggcttatgcc cctgcactga agtgtgagga gcaggaatat |
| 2041 | taaagggatt caggcctc |
| Human IL1RL1 mRNA Variant 2 | |
| (SEQ ID NO: 124) | |
| 1 | agtctatgag gagggaccta caaagactgg aaactattct tagctccgtc actgactcca |
| 61 | agttcatccc ctctgtcttt cagtttggtt gagatatagg ctactcttcc caactcagtc |
| 121 | ttgaagagta tcaccaactg cctcatgtgt ggtgaccttc actgtcgtat gccagtgact |
| 181 | catctggagt aatctcaaca acgagttacc aatacttgct cttgattgat aaacagaatg |
| 241 | gggttttgga tcttagcaat tctcacaatt ctcatgtatt ccacagcagc aaagtttagt |
| 301 | aaacaatcat ggggcctgga aaatgaggct ttaattgtaa gatgtcctag acaaggaaaa |
| 361 | cctagttaca ccgtggattg gtattactca caaacaaaca aaagtattcc cactcaggaa |
| 421 | agaaatcgtg tgtttgcctc aggccaactt ctgaagtttc taccagctgc agttgctgat |
| 481 | tctggtattt atacctgtat tgtcagaagt cccacattca ataggactgg atatgcgaat |
| 541 | gtcaccatat ataaaaaaca atcagattgc aatgttccag attatttgat gtattcaaca |
| 601 | gtatctggat cagaaaaaaa ttccaaaatt tattgtccta ccattgacct ctacaactgg |
| 661 | acagcacctc ttgagtggtt taagaattgt caggctcttc aaggatcaag gtacagggcg |
| 721 | cacaagtcat ttttggtcat tgataatgtg atgactgagg acgcaggtga ttacacctgt |
| 781 | aaatttatac acaatgaaaa tggagccaat tatagtgtga cggcgaccag gtccttcacg |
| 841 | gtcaaggatg agcaaggctt ttctctgttt ccagtaatcg gagcccctgc acaaaatgaa |
| 901 | ataaaggaag tggaaattgg aaaaaacgca aacctaactt gctctgcttg ttttggaaaa |
| 961 | ggcactcagt tcttggctgc cgtcctgtgg cagcttaatg gaacaaaaat tacagacttt |
| 1021 | ggtgaaccaa gaattcaaca agaggaaggg caaaatcaaa gtttcagcaa tgggctggct |
| 1081 | tgtctagaca tggttttaag aatagctgac gtgaaggaag aggatttatt gctgcagtac |
| 1141 | gactgtctgg ccctgaattt gcatggcttg agaaggcaca ccgtaagact aagtaggaaa |
| 1201 | aatccaagta aggagtgttt ctgagacttt gatcacctga actttctcta gcaagtgtaa |
| 1261 | gcagaatgga gtgtggttcc aagagatcca tcaagacaat gggaatggcc tgtgccataa |
| 1321 | aatgtgcttc tcttcttcgg gatgttgttt gctgtctgat ctttgtagac tgttcctgtt |
| 1381 | tgctgggagc ttctctgctg cttaaattgt tcgtcctccc ccactccctc ctatcgttgg |
| 1441 | tttgtctaga acactcagct gcttctttgg tcatccttgt tttctaactt tatgaactcc |
| 1501 | ctctgtgtca ctgtatgtga aaggaaatgc accaacaacc gtaaactgaa cgtgttcttt |
| 1561 | tgtgctcttt tataacttgc attacatgtt gtaagcatgg tccgttctat acctttttct |
| 1621 | ggtcataatg aacactcatt ttgttagcga gggtggtaaa gtgaacaaaa aggggaagta |
| 1681 | tcaaactact gccatttcag tgagaaaatc ctaggtgcta ctttataata agacatttgt |
| 1741 | taggccattc ttgcattgat ataaagaaat acctgagact gggtgattta tatgaaaaga |
| 1801 | ggtttaattg gctcacagtt ctgcaggctg tatgggaagc atggcggcat ctgcttctgg |
| 1861 | ggacacctca ggagctttac tcatggcaga aggcaaagca aaggcaggca cttcacacag |
| 1921 | taaaagcagg agcgagagag aggtgccaca ctgaaacagc cagatctcat gagaagtcac |
| 1981 | tcactattgc aaggacagca tcaaagagat ggtgctaaac cattcatgat gaactcaccc |
| 2041 | ccatgatcca atcacctccc accaggctcc acctcgaata ctggggatta ccattcagca |
| 2101 | tgagatttgg gcaggaacac agacccaaac cataccacac acattatcat tgttaaactt |
| 2161 | tgtaaagtat ttaaggtaca tggaacacac gggaagtctg gtagctcagc ccatttcttt |
| 2221 | attgcatctg ttattcacca tgtaattcag gtaccacgta ttccagggag cctttcttgg |
| 2281 | ccctcagttt gcagtataca cactttccaa gtactcttgt agcatcctgt ttgtatcata |
| 2341 | gcactggtca cattgcctta cctaaatctg tttgacagtc tgctcaacac gactgcaagc |
| 2401 | tccatgaggg cagggacatc atctcttcca tctttgggtc cttagtgcaa tacctggcag |
| 2461 | ctagccagtg ctcagctaaa tatttgttga ctgaataaat gaatgcacaa ccaaattatt |
| 2521 | gataccaaat gttttttttg tgtacatttc tacttctcta gctataagtc ttaattatac |
| 2581 | aacaaaatac tatttttata tttatgtttg gtaaattcaa taactttcct catcatttgg |
| 2641 | aaagtcaaat tgtttattgc ttccctacag ttttttctga atctagcagg attttaatga |
| 2701 | tatcattata atttgacaca ataaaaggac aacatgaaac tgatgaatct ttattgggtt |
| 2761 | aatttcagac actatataat cttttaaaaa tgtaacattc ttttttatat ataaataatt |
| 2821 | ggtggcatca caaatagcca aagcagggtg gagagagtga tccttcctgg gtgcaggcaa |
| 2881 | gaaggggata tgttttctac agagttttca aaacagtgat aaagctgtct acaagtcatt |
| 2941 | gtgcttttta tcatcactat gcccagacaa tgtgaaacat cagagatgaa gtgctcttcc |
| 3001 | cacagaggtg gactgatcct tctccccact cccttggtgt gtctctgaat gcaatgttgt |
| 3061 | cttggaaaac agctttccaa gcatttcact cctgagcact tgccagtttc ctcacttgtt |
| 3121 | cttcacatat ccaggcaaag acatcctgtt tgctatatga agcattgtat cccgtataaa |
| 3181 | aggaaggaaa gagagaaata tatttttaca ctcatcactc ctcaggggct gtacaatcat |
| 3241 | gtagaaattg tttaatgtgc ctgtcaaata gccaaagagt gttaaaccct gagttcccac |
| 3301 | ccatgtgtgt ggtatggtta ggattcatcc agatacacag agagaggcac aacaggagga |
| 3361 | gaaaggatag gggtgtgggg acagcgggcc cccaatatgg tgtaatcgtg gcaggtctct |
| 3421 | gcctgaagtg ctatgtgggg tttttcttgt tttaattttg actttaaccc ctgatttgta |
| 3481 | agtttttcat aaaataaaca gaatcataac tcatgtagat ggctataagt gccgtagtgt |
| 3541 | tctgtgggtc tctggtgtct gccagtgata agtgtggcac cccaggaagg ctgtggaccc |
| 3601 | catcaaggtg ctatgtgagg gccatgcttg gggtggtggt gggcccagta gaccctgcag |
| 3661 | ccatccatcc agcctgccca ctcacactgc ccttgtgtac tcctgctttg ctacgttatc |
| 3721 | attgatcaat gtccctggtt acctatgtgt ttgaattatc ttcgtgttac aggtgtttaa |
| 3781 | tgattttgct ccttctagct tatttgtatt tcacctgttt ttctttaaat caacatggtt |
| 3841 | acactctgtt tcagcaactg tataaattaa acacaaatta ttactactgc taaaaaaaaa |
| 3901 | aaaaaaaaa |
| Human IL1RL1 mRNA Variant 3 | |
| (SEQ ID NO: 125) | |
| 1 | aaagagaggc tggctgttgt atttagtaaa gctataaagc tgtaagagaa attggctttc |
| 61 | tgagttgtga aactgtgggc agaaagttga ggaagaaaga actcaagtac aacccaatga |
| 121 | gggccaactt ctgaagtttc taccagctgc agttgctgat tctggtattt atacctgtat |
| 181 | tgtcagaagt cccacattca ataggactgg atatgcgaat gtcaccatat ataaaaaaca |
| 241 | atcagattgc aatgttccag attatttgat gtattcaaca gtatctggat cagaaaaaaa |
| 301 | ttccaaaatt tattgtccta ccattgacct ctacaactgg acagcacctc ttgagtggtt |
| 361 | taagaattgt caggctcttc aaggatcaag gtacagggcg cacaagtcat ttttggtcat |
| 421 | tgataatgtg atgactgagg acgcaggtga ttacacctgt aaatttatac acaatgaaaa |
| 481 | tggagccaat tatagtgtga cggcgaccag gtccttcacg gtcaaggatg agcaaggctt |
| 541 | ttctctgttt ccagtaatcg gagcccctgc acaaaatgaa ataaaggaag tggaaattgg |
| 601 | aaaaaacgca aacctaactt gctctgcttg ttttggaaaa ggcactcagt tcttggctgc |
| 661 | cgtcctgtgg cagcttaatg gaacaaaaat tacagacttt ggtgaaccaa gaattcaaca |
| 721 | agaggaaggg caaaatcaaa gtttcagcaa tgggctggct tgtctagaca tggttttaag |
| 781 | aatagctgac gtgaaggaag aggatttatt gctgcagtac gactgtctgg ccctgaattt |
| 841 | gcatggcttg agaaggcaca ccgtaagact aagtaggaaa aatccaagta aggagtgttt |
| 901 | ctgagacttt gatcacctga actttctcta gcaagtgtaa gcagaatgga gtgtggttcc |
| 961 | aagagatcca tcaagacaat gggaatggcc tgtgccataa aatgtgcttc tcttcttcgg |
| 1021 | gatgttgttt gctgtctgat ctttgtagac tgttcctgtt tgctgggagc ttctctgctg |
| 1081 | cttaaattgt tcgtcctccc ccactccctc ctatcgttgg tttgtctaga acactcagct |
| 1141 | gcttctttgg tcatccttgt tttctaactt tatgaactcc ctctgtgtca ctgtatgtga |
| 1201 | aaggaaatgc accaacaacc gtaaactgaa cgtgttcttt tgtgctcttt tataacttgc |
| 1261 | attacatgtt gtaagcatgg tccgttctat acctttttct ggtcataatg aacactcatt |
| 1321 | ttgttagcga gggtggtaaa gtgaacaaaa aggggaagta tcaaactact gccatttcag |
| 1381 | tgagaaaatc ctaggtgcta ctttataata agacatttgt taggccattc ttgcattgat |
| 1441 | ataaagaaat acctgagact gggtgattta tatgaaaaga ggtttaattg gctcacagtt |
| 1501 | ctgcaggctg tatgggaagc atggcggcat ctgcttctgg ggacacctca ggagctttac |
| 1561 | tcatggcaga aggcaaagca aaggcaggca cttcacacag taaaagcagg agcgagagag |
| 1621 | aggtgccaca ctgaaacagc cagatctcat gagaagtcac tcactattgc aaggacagca |
| 1681 | tcaaagagat ggtgctaaac cattcatgat gaactcaccc ccatgatcca atcacctccc |
| 1741 | accaggctcc acctcgaata ctggggatta ccattcagca tgagatttgg gcaggaacac |
| 1801 | agacccaaac cataccacac acattatcat tgttaaactt tgtaaagtat ttaaggtaca |
| 1861 | tggaacacac gggaagtctg gtagctcagc ccatttcttt attgcatctg ttattcacca |
| 1921 | tgtaattcag gtaccacgta ttccagggag cctttcttgg ccctcagttt gcagtataca |
| 1981 | cactttccaa gtactcttgt agcatcctgt ttgtatcata gcactggtca cattgcctta |
| 2041 | cctaaatctg tttgacagtc tgctcaacac gactgcaagc tccatgaggg cagggacatc |
| 2101 | atctcttcca tctttgggtc cttagtgcaa tacctggcag ctagccagtg ctcagctaaa |
| 2161 | tatttgttga ctgaataaat gaatgcacaa ccaaattatt gataccaaat gttttttttg |
| 2221 | tgtacatttc tacttctcta gctataagtc ttaattatac aacaaaatac tatttttata |
| 2281 | tttatgtttg gtaaattcaa taactttcct catcatttgg aaagtcaaat tgtttattgc |
| 2341 | ttccctacag ttttttctga atctagcagg attttaatga tatcattata atttgacaca |
| 2401 | ataaaaggac aacatgaaac tgatgaatct ttattgggtt aatttcagac actatataat |
| 2461 | cttttaaaaa tgtaacattc ttttttatat ataaataatt ggtggcatca caaatagcca |
| 2521 | aagcagggtg gagagagtga tccttcctgg gtgcaggcaa gaaggggata tgttttctac |
| 2581 | agagttttca aaacagtgat aaagctgtct acaagtcatt gtgcttttta tcatcactat |
| 2641 | gcccagacaa tgtgaaacat cagagatgaa gtgctcttcc cacagaggtg gactgatcct |
| 2701 | tctccccact cccttggtgt gtctctgaat gcaatgttgt cttggaaaac agctttccaa |
| 2761 | gcatttcact cctgagcact tgccagtttc ctcacttgtt cttcacatat ccaggcaaag |
| 2821 | acatcctgtt tgctatatga agcattgtat cccgtataaa aggaaggaaa gagagaaata |
| 2881 | tatttttaca ctcatcactc ctcaggggct gtacaatcat gtagaaattg tttaatgtgc |
| 2941 | ctgtcaaata gccaaagagt gttaaaccct gagttcccac ccatgtgtgt ggtatggtta |
| 3001 | ggattcatcc agatacacag agagaggcac aacaggagga gaaaggatag gggtgtgggg |
| 3061 | acagcgggcc cccaatatgg tgtaatcgtg gcaggtctct gcctgaagtg ctatgtgggg |
| 3121 | tttttcttgt tttaattttg actttaaccc ctgatttgta agtttttcat aaaataaaca |
| 3181 | gaatcataac tcatgtagat ggctataagt gccgtagtgt tctgtgggtc tctggtgtct |
| 3241 | gccagtgata agtgtggcac cccaggaagg ctgtggaccc catcaaggtg ctatgtgagg |
| 3301 | gccatgcttg gggtggtggt gggcccagta gaccctgcag ccatccatcc agcctgccca |
| 3361 | ctcacactgc ccttgtgtac tcctgctttg ctacgttatc attgatcaat gtccctggtt |
| 3421 | acctatgtgt ttgaattatc ttcgtgttac aggtgtttaa tgattttgct ccttctagct |
| 3481 | tatttgtatt tcacctgttt ttctttaaat caacatggtt acactctgtt tcagcaactg |
| 3541 | tataaattaa acacaaatta ttactactgc taaaaaaaaa aaaaaaaaa |

[0624] An antisense nucleic acid molecule can be complementary to all or part of a non-coding region of the coding strand of a nucleotide sequence encoding an IL-1α, IL-1β, IL-18, IL-36α, IL-36β, IL-36γ, IL-38, IL-33, IL-1R1, IL1RAP, IL-18Ra, IL-1RL2, or IL1RL1 protein. Non-coding regions (5′ and 3′ untranslated regions) are the 5′ and 3′ sequences that flank the coding region in a gene and are not translated into amino acids.

[0625] Based upon the sequences disclosed herein, one of skill in the art can easily choose and synthesize any of a number of appropriate antisense nucleic acids to target a nucleic acid encoding an IL-1α, IL-1β, IL-18, IL-36α, IL-36β, IL-36γ, IL-38, IL-33, IL-1R1, IL1RAP, IL-18Rα, IL-1RL2, or IL1RL1 protein described herein. Antisense nucleic acids targeting a nucleic acid encoding an IL-1α, IL-1β, IL-18, IL-36α, IL-36β, IL-36γ, IL-38, IL-33, IL-1R1, IL1RAP, IL-18Rα, IL-1RL2, or IL1RL1 protein can be designed using the software available at the Integrated DNA Technologies website.

[0626] An antisense nucleic acid can be, for example, about 5, 10, 15, 20, 25, 30, 35, 40, 45, or 50 nucleotides or more in length. An antisense oligonucleotide can be constructed using chemical synthesis and enzymatic ligation reactions using procedures known in the art. For example, an antisense nucleic acid can be chemically synthesized using naturally occurring nucleotides or variously modified nucleotides designed to increase the biological stability of the molecules or to increase the physical stability of the duplex formed between the antisense and sense nucleic acids, e.g., phosphorothioate derivatives and acridine substituted nucleotides can be used.

[0627] Examples of modified nucleotides which can be used to generate an antisense nucleic acid include 5-fluorouracil, 5-bromouracil, 5-chlorouracil, 5-iodouracil, hypoxanthine, xanthine, 4-acetylcytosine, 5-(carboxyhydroxylmethyl) uracil, 5-carboxymethylaminomethyl-2-thiouridine, 5-carboxymethylaminomethyluracil, dihydrouracil, beta-D-galactosylqueosine, inosine, N6-isopentenyladenine, 1-methylguanine, 1-methylinosine, 2,2-dimethylguanine, 2-methyladenine, 2-methylguanine, 3-methylcytosine, 5-methylcytosine, N6-adenine, 7-methylguanine, 5-methylaminomethyluracil, 5-methoxyaminomethyl-2-thiouracil, beta-D-mannosylqueosine, 5′-methoxycarboxymethyluracil, 5-methoxyuracil, 2-methylthio-N6-isopentenyladenine, uracil-5-oxyacetic acid (v), wybutoxosine, pseudouracil, queosine, 2-thiocytosine, 5-methyl-2-thiouracil, 2-thiouracil, 4-thiouracil, 5-methyluracil, uracil-5-oxyacetic acid methylester, uracil-5-oxyacetic acid (v), 5-methyl-2-thiouracil, 3-(3-amino-3-N-2-carboxypropyl) uracil, (acp3)w, and 2,6-diaminopurine. Alternatively, the antisense nucleic acid can be produced biologically using an expression vector into which a nucleic acid has been subcloned in an antisense orientation (i.e., RNA transcribed from the inserted nucleic acid will be of an antisense orientation to a target nucleic acid of interest).

[0628] The antisense nucleic acid molecules described herein can be prepared in vitro and administered to a mammal, e.g., a human. Alternatively, they can be generated in situ such that they hybridize with or bind to cellular mRNA and/or genomic DNA encoding an IL-1α, IL-1β, IL-18, IL-36α, IL-36β, IL-36γ, IL-38, IL-33, IL-1R1, IL1RAP, IL-18Rα, IL-1RL2, or IL1RL1 protein to thereby inhibit expression, e.g., by inhibiting transcription and/or translation. The hybridization can be by conventional nucleotide complementarities to form a stable duplex, or, for example, in the case of an antisense nucleic acid molecule that binds to DNA duplexes, through specific interactions in the major groove of the double helix. The antisense nucleic acid molecules can be delivered to a mammalian cell using a vector (e.g., a lentivirus, a retrovirus, or an adenovirus vector).

[0629] An antisense nucleic acid can be an α-anomeric nucleic acid molecule. An α-anomeric nucleic acid molecule forms specific double-stranded hybrids with complementary RNA in which, contrary to the usual, β-units, the strands run parallel to each other (Gaultier et al., Nucleic Acids Res. 15:6625-6641, 1987). The antisense nucleic acid can also comprise a 2′-O-methylribonucleotide (Inoue et al., Nucleic Acids Res. 15:6131-6148, 1987) or a chimeric RNA-DNA analog (Inoue et al., FEBS Lett. 215:327-330, 1987).

[0630] Another example of an inhibitory nucleic acid is a ribozyme that has specificity for a nucleic acid encoding an IL-1α, IL-1β, IL-18, IL-36α, IL-36β, IL-36γ, IL-38, IL-33, IL-1R1, IL1RAP, IL-18Rα, IL-1RL2, or IL1RL1 protein (e.g., specificity for an IL-1α, IL-1β, IL-18, IL-36α, IL-36β, IL-36γ, IL-38, IL-33, IL-1R1, IL1RAP, IL-18Rα, IL-1RL2, or IL1RL1 mRNA, e.g., specificity for any one of SEQ ID NOs: 62-102). Ribozymes are catalytic RNA molecules with ribonuclease activity that are capable of cleaving a single-stranded nucleic acid, such as an mRNA, to which they have a complementary region. Thus, ribozymes (e.g., hammerhead ribozymes (described in Haselhoff and Gerlach, Nature 334:585-591, 1988)) can be used to catalytically cleave mRNA transcripts to thereby inhibit translation of the protein encoded by the mRNA. A ribozyme having specificity for an IL-1α, IL-1β, IL-18, IL-36α, IL-36β, IL-36β, IL-38, IL-33, IL-1R1, IL1RAP, IL-18Rα, IL-1RL2, or IL1RL1 mRNA can be designed based upon the nucleotide sequence of any of the IL-1α, IL-1β, IL-18, IL-36α, IL-36β, IL-36γ, IL-38, IL-33, IL-1R1, IL1RAP, IL-18Rα, IL-1RL2, or IL1RL1 mRNA sequences disclosed herein. For example, a derivative of a Tetrahymena L-19 IVS RNA can be constructed in which the nucleotide sequence of the active site is complementary to the nucleotide sequence to be cleaved in an IL-1α, IL-1β, IL-18, IL-36α, IL-360, IL-36γ, IL-38, IL-33, IL-1R1, IL1RAP, IL-18Rα, IL-1RL2, or IL1RL1 mRNA (see, e.g., U.S. Pat. Nos. 4,987,071 and 5,116,742). Alternatively, a SMAD7 mRNA can be used to select a catalytic RNA having a specific ribonuclease activity from a pool of RNA molecules. See, e.g., Bartel et al., Science 261:1411-1418, 1993.

[0631] An inhibitory nucleic acid can also be a nucleic acid molecule that forms triple helical structures. For example, expression of an IL-1α, IL-1β, I-18, IL,-36α, IL-36β, IL-36γ, IL-38, IL-33, IL-1R1, IL1RAP, IL-18Rα, IL-1RL2, or IL1RL1 polypeptide can be inhibited by targeting nucleotide sequences complementary to the regulatory region of the gene encoding the IL-1α, IL-1β, IL-18, IL-36α, IL-360, IL-36γ, IL-38, IL-33, IL-1R1, IL1RAP, IL-18Rα, IL-1RL2, or IL1RL1 polypeptide (e.g., the promoter and/or enhancer, e.g., a sequence that is at least 1 kb, 2 kb, 3 kb, 4 kb, or 5 kb upstream of the transcription initiation start state) to form triple helical structures that prevent transcription of the gene in target cells. See generally Helene, Anticancer Drug Des. 6(6):569-84, 1991; Helene, Ann. N.Y. Acad. Sci. 660:27-36, 1992; and Maher, Bioassays 14(12):807-15, 1992.

[0632] In various embodiments, inhibitory nucleic acids can be modified at the base moiety, sugar moiety, or phosphate backbone to improve, e.g., the stability, hybridization, or solubility of the molecule. For example, the deoxyribose phosphate backbone of the nucleic acids can be modified to generate peptide nucleic acids (see, e.g., Hyrup et al., Bioorganic Medicinal Chem. 4(1):5-23, 1996). Peptide nucleic acids (PNAs) are nucleic acid mimics, e.g., DNA mimics, in which the deoxyribose phosphate backbone is replaced by a pseudopeptide backbone and only the four natural nucleobases are retained. The neutral backbone of PNAs allows for specific hybridization to DNA and RNA under conditions of low ionic strength. The synthesis of PNA oligomers can be performed using standard solid phase peptide synthesis protocols (see, e.g., Perry-O'Keefe et al., Proc. Natl. Acad. Sci. U.S.A. 93:14670-675, 1996). PNAs can be used as antisense or antigene agents for sequence-specific modulation of gene expression by, e.g., inducing transcription or translation arrest or inhibiting replication.

[0633] PNAs can be modified, e.g., to enhance their stability or cellular uptake, by attaching lipophilic or other helper groups to PNA, by the formation of PNA-DNA chimeras, or by the use of liposomes or other techniques of drug delivery known in the art. For example, PNA-DNA chimeras can be generated which may combine the advantageous properties of PNA and DNA. Such chimeras allow DNA recognition enzymes, e.g., RNAse H and DNA polymerases, to interact with the DNA portion while the PNA portion would provide high binding affinity and specificity. PNA-DNA chimeras can be linked using linkers of appropriate lengths selected in terms of base stacking, number of bonds between the nucleobases, and orientation.

[0634] The synthesis of PNA-DNA chimeras can be performed as described in Finn et al., Nucleic Acids Res. 24:3357-63, 1996. For example, a DNA chain can be synthesized on a solid support using standard phosphoramidite coupling chemistry and modified nucleoside analogs. Compounds such as 5′-(4-methoxytrityl)amino-5′-deoxy-thymidine phosphoramidite can be used as a link between the PNA and the 5′ end of DNA (Mag et al., Nucleic Acids Res. 17:5973-88, 1989). PNA monomers are then coupled in a stepwise manner to produce a chimeric molecule with a 5′ PNA segment and a 3′ DNA segment (Finn et al., Nucleic Acids Res. 24:3357-63, 1996). Alternatively, chimeric molecules can be synthesized with a 5′ DNA segment and a 3′ PNA segment (Peterser et al., Bioorganic Med. Chem. Lett. 5:1119-11124, 1975).

[0635] In some embodiments, the inhibitory nucleic acids can include other appended groups such as peptides, or agents facilitating transport across the cell membrane (see, Letsinger et al., Proc. Nat. Acad. Sci. U.S.A. 86:6553-6556, 1989; Lemaitre et al., Proc. Nat. Acad. Sci. U.S.A. 84:648-652, 1989; and WO 88/09810). In addition, the inhibitory nucleic acids can be modified with hybridization-triggered cleavage agents (see, e.g., Krol et al., Bio/Techniques 6:958-976, 1988) or intercalating agents (see, e.g., Zon, Pharm. Res., 5:539-549, 1988). To this end, the oligonucleotide may be conjugated to another molecule, e.g., a peptide, hybridization triggered cross-linking agent, transport agent, hybridization-triggered cleavage agent, etc.

[0636] Another means by which expression of an IL-1α, IL-1β, IL-18, IL-36α, IL-36β, IL-36γ, IL-38, IL-33, IL-1R1, IL1RAP, IL-18Rα, IL-1RL2, or IL1RL1 mRNA can be decreased in a mammalian cell is by RNA interference (RNAi). RNAi is a process in which mRNA is degraded in host cells. To inhibit an mRNA, double-stranded RNA (dsRNA) corresponding to a portion of the gene to be silenced (e.g., a gene encoding an IL-1α, IL-1β, IL-18, IL-36α, IL-36β, IL-36γ, IL-38, IL-33, IL-1R1, IL1RAP, IL-18Rα, IL-1RL2, or IL1RL1 polypeptide) is introduced into a mammalian cell. The dsRNA is digested into 21-23 nucleotide-long duplexes called short interfering RNAs (or siRNAs), which bind to a nuclease complex to form what is known as the RNA-induced silencing complex (or RISC). The RISC targets the homologous transcript by base pairing interactions between one of the siRNA strands and the endogenous mRNA. It then cleaves the mRNA about 12 nucleotides from the 3′ terminus of the siRNA (see Sharp et al., Genes Dev. 15:485-490, 2001, and Hammond et al., Nature Rev. Gen. 2:110-119, 2001).

[0637] RNA-mediated gene silencing can be induced in a mammalian cell in many ways, e.g., by enforcing endogenous expression of RNA hairpins (see, Paddison et al., Proc. Natl. Acad. Sci. U.S.A. 99:1443-1448, 2002) or, as noted above, by transfection of small (21-23 nt) dsRNA (reviewed in Caplen, Trends Biotech. 20:49-51, 2002). Methods for modulating gene expression with RNAi are described, e.g., in U.S. Pat. No. 6,506,559 and US 2003/0056235, which are hereby incorporated by reference.

[0638] Standard molecular biology techniques can be used to generate siRNAs. Short interfering RNAs can be chemically synthesized, recombinantly produced, e.g., by expressing RNA from a template DNA, such as a plasmid, or obtained from commercial vendors, such as Dharmacon. The RNA used to mediate RNAi can include synthetic or modified nucleotides, such as phosphorothioate nucleotides. Methods of transfecting cells with siRNA or with plasmids engineered to make siRNA are routine in the art.

[0639] The siRNA molecules used to decrease expression of an IL-1α, IL-1β, IL-18, IL-36α, IL-36β, IL-36γ, IL-38, IL-33, IL-1R1, IL1RAP, IL-18Rα, IL-1RL2, or IL1RL1 mRNA can vary in a number of ways. For example, they can include a 3′ hydroxyl group and strands of 21, 22, or 23 consecutive nucleotides. They can be blunt ended or include an overhanging end at either the 3′ end, the 5′ end, or both ends. For example, at least one strand of the RNA molecule can have a 3′ overhang from about 1 to about 6 nucleotides (e.g., 1-5, 1-3, 2-4, or 3-5 nucleotides (whether pyrimidine or purine nucleotides) in length. Where both strands include an overhang, the length of the overhangs may be the same or different for each strand.

[0640] To further enhance the stability of the RNA duplexes, the 3′ overhangs can be stabilized against degradation (by, e.g., including purine nucleotides, such as adenosine or guanosine nucleotides or replacing pyrimidine nucleotides by modified analogues (e.g., substitution of uridine 2-nucleotide 3′ overhangs by 2′-deoxythymidine is tolerated and does not affect the efficiency of RNAi). Any siRNA can be used in the methods of decreasing an IL-1α, IL-1, IL-18, IL-36α, IL-36β, IL-36γ, IL-38, IL-33, IL-1R1, IL1RAP, IL-18Rα, IL-1RL2, or IL1RL1 mRNA, provided it has sufficient homology to the target of interest (e.g., a sequence present in any one of SEQ ID NOs: 62-102, e.g., a target sequence encompassing the translation start site or the first exon of the mRNA). There is no upper limit on the length of the siRNA that can be used (e.g., the siRNA can range from about 21 base pairs of the gene to the full length of the gene or more (e.g., about 20 to about 30 base pairs, about 50 to about 60 base pairs, about 60 to about 70 base pairs, about 70 to about 80 base pairs, about 80 to about 90 base pairs, or about 90 to about 100 base pairs).

[0641] As described herein, inhibitory nucleic acids preferentially bind (e.g., hybridize) to a nucleic acid encoding IL-1α, IL-1β, IL-18, IL-36α, IL-36β, IL-36γ, IL-38, IL-33, IL-1R1, IL1RAP, IL-18Rα, IL-1RL2, or IL1RL1 protein to treat allergic diseases (e.g., asthma (Corren et al., N. Engl. J. Med. 365: 1088-1098, 2011)), radiation lung injury (Chung et al., Sci. Rep. 6: 39714, 2016), ulcerative colitis (Hua et al., Br. J. Clin. Pharmacol. 80:101-109, 2015), dermatitis (Guttman-Yassky et al., Exp. Opin. Biol. Ther. 13(4):1517, 2013), and chronic obstructive pulmonary disease (COPD) (Walsh et al. (2010) Curr. Opin. Investig Drugs. 11(11):1305-1312, 2010).

[0642] Exemplary IL-1 inhibitors that are antisense nucleic acids are described in Yilmaz-Elis et al., Mol. Ther. Nucleic Acids 2(1): e66, 2013; Lu et al., J. Immunol. 190(12): 6570-6578, 2013), small interfering RNA (siRNA) (e.g., Ma et al., Ann. Hepatol. 15(2): 260-270, 2016), or combinations thereof. In certain embodiments, a therapeutically effective amount of an inhibitory nucleic acid targeting a nucleic acid encoding IL-1α, IL-1β, IL-18, IL-36α, IL-36β, IL-36γ, IL-38, IL-33, IL-1R1, IL1RAP, IL-18Rα, IL-1RL2, or IL1RL1 protein can be administered to a subject (e.g., a human subject) in need thereof.

[0643] In some embodiments, the inhibitory nucleic acid can be about 10 nucleotides to about 40 nucleotides (e.g., about 10 to about 30 nucleotides, about 10 to about 25 nucleotides, about 10 to about 20 nucleotides, about 10 to about 15 nucleotides, 10 nucleotides, 11 nucleotides, 12 nucleotides, 13 nucleotides, 14 nucleotides, 15 nucleotides, 16 nucleotides, 17 nucleotides, 18 nucleotides, 19 nucleotides, 20 nucleotides, 21 nucleotides, 22 nucleotides, 23 nucleotides, 24 nucleotides, 25 nucleotides, 26 nucleotides, 27 nucleotides, 28 nucleotides, 29 nucleotides, 30 nucleotides, 31 nucleotides, 32 nucleotides, 33 nucleotides, 34 nucleotides, 35 nucleotides, 36 nucleotides, 37 nucleotides, 38 nucleotides, 39 nucleotides, or 40 nucleotides) in length. One skilled in the art will appreciate that inhibitory nucleic acids may comprise at least one modified nucleic acid at either the 5′ or 3′end of DNA or RNA.

[0644] As is known in the art, the term “thermal melting point (Tm)” refers to the temperature, under defined ionic strength, pH, and inhibitory nucleic acid concentration, at which 50% of the inhibitory nucleic acids complementary to the target sequence hybridize to the target sequence at equilibrium. In some embodiments, an inhibitory nucleic acid can bind specifically to a target nucleic acid under stingent conditions, e.g., those in which the salt concentration is at least about 0.01 to 1.0 M Na ion concentration (or other salts) at pH 7.0 to 8.3 and the temperature is at least about 30° C. for short oligonucleotides (e.g., 10 to 50 nucleotide). Stringent conditions can also be achieved with the addition of destabilizing agents such as formamide.

[0645] In some embodiments of any of the inhibitory nucleic acids described herein, the inhibitory nucleic acid binds to a target nucleic acid (e.g., a nucleic acid encoding any one of IL-1α, IL-1β, IL-18, IL-36α, IL-36β, IL-36γ, IL-38, IL-33, IL-1R1, IL1RAP, IL-18Rα, IL-1RL2, or IL1RL1) with a Tm of greater than 20° C., greater than 22° C., greater than 24° C., greater than 26° C., greater than 28° C., greater than 30° C., greater than 32° C., greater than 34° C., greater than 36° C., greater than 38° C., greater than 40° C., greater than 42° C., greater than 44° C., greater than 46° C., greater than 48° C., greater than 50° C., greater than 52° C., greater than 54° C., greater than 56° C., greater than 58° C., greater than 60° C., greater than 62° C., greater than 64° C., greater than 66° C., greater than 68° C., greater than 70° C., greater than 72° C., greater than 74° C., greater than 76° C., greater than 78° C., or greater than 80° C., e.g., as measured in phosphate buffered saline using a UV spectrophotometer.

[0646] In some embodiments of any of the inhibitor nucleic acids described herein, the inhibitory nucleic acid binds to a target nucleic acid (e.g., a nucleic acid encoding any one of IL-1α, IL-1β, IL-18, IL-36α, IL-36β, IL-36γ, IL-38, IL-33, IL-1R1, IL1RAP, IL-18Rα, IL-1RL2, or IL1RL1) with a Tₘ of about 20° C. to about 80° C., about 78° C., about 76° C., about 74° C., about 72° C., about 70° C., about 68° C., about 66° C., about 64° C., about 62° C., about 60° C., about 58° C., about 56° C., about 54° C., about 52° C., about 50° C., about 48° C., about 46° C., about 44° C., about 42° C., about 40° C., about 38° C., about 36° C., about 34° C., about 32° C., about 30° C., about 28° C., about 26° C., about 24° C., or about 22° C. (inclusive); about 22° C. to about 80° C., about 78° C., about 76° C., about 74° C., about 72° C., about 70° C., about 68° C., about 66° C., about 64° C., about 62° C., about 60° C., about 58° C., about 56° C., about 54° C., about 52° C., about 50° C., about 48° C., about 46° C., about 44° C., about 42° C., about 40° C., about 38° C., about 36° C., about 34° C., about 32° C., about 30° C., about 28° C., about 26° C., or about 24° C. (inclusive); about 24° C. to about 80° C., about 78° C., about 76° C., about 74° C., about 72° C., about 70° C., about 68° C., about 66° C., about 64° C., about 62° C., about 60° C., about 58° C., about 56° C., about 54° C., about 52° C., about 50° C., about 48° C., about 46° C., about 44° C., about 42° C., about 40° C., about 38° C., about 36° C., about 34° C., about 32° C., about 30° C., about 28° C., or about 26° C. (inclusive); about 26° C. to about 80° C., about 78° C., about 76° C., about 74° C., about 72° C., about 70° C., about 68° C., about 66° C., about 64° C., about 62° C., about 60° C., about 58° C., about 56° C., about 54° C., about 52° C., about 50° C., about 48° C., about 46° C., about 44° C., about 42° C., about 40° C., about 38° C., about 36° C., about 34° C., about 32° C., about 30° C., or about 28° C. (inclusive); about 28° C. to about 80° C., about 78° C., about 76° C., about 74° C., about 72° C., about 70° C., about 68° C., about 66° C., about 64° C., about 62° C., about 60° C., about 58° C., about 56° C., about 54° C., about 52° C., about 50° C., about 48° C., about 46° C., about 44° C., about 42° C., about 40° C., about 38° C., about 36° C., about 34° C., about 32° C., or about 30° C. (inclusive); about 30° C. to about 80° C., about 78° C., about 76° C., about 74° C., about 72° C., about 70° C., about 68° C., about 66° C., about 64° C., about 62° C., about 60° C., about 58° C., about 56° C., about 54° C., about 52° C., about 50° C., about 48° C., about 46° C., about 44° C., about 42° C., about 40° C., about 38° C., about 36° C., about 34° C., or about 32° C. (inclusive); about 32° C. to about 80° C., about 78° C., about 76° C., about 74° C., about 72° C., about 70° C., about 68° C., about 66° C., about 64° C., about 62° C., about 60° C., about 58° C., about 56° C., about 54° C., about 52° C., about 50° C., about 48° C., about 46° C., about 44° C., about 42° C., about 40° C., about 38° C., about 36° C., or about 34° C. (inclusive); about 34° C. to about 80° C., about 78° C., about 76° C., about 74° C., about 72° C., about 70° C., about 68° C., about 66° C., about 64° C., about 62° C., about 60° C., about 58° C., about 56° C., about 54° C., about 52° C., about 50° C., about 48° C., about 46° C., about 44° C., about 42° C., about 40° C., about 38° C., or about 36° C. (inclusive); about 36° C. to about 80° C., about 78° C., about 76° C., about 74° C., about 72° C., about 70° C., about 68° C., about 66° C., about 64° C., about 62° C., about 60° C., about 58° C., about 56° C., about 54° C., about 52° C., about 50° C., about 48° C., about 46° C., about 44° C., about 42° C., about 40° C., or about 38° C. (inclusive); about 38° C. to about 80° C., about 78° C., about 76° C., about 74° C., about 72° C., about 70° C., about 68° C., about 66° C., about 64° C., about 62° C., about 60° C., about 58° C., about 56° C., about 54° C., about 52° C., about 50° C., about 48° C., about 46° C., about 44° C., about 42° C., or about 40° C. (inclusive); about 40° C. to about 80° C., about 78° C., about 76° C., about 74° C., about 72° C., about 70° C., about 68° C., about 66° C., about 64° C., about 62° C., about 60° C., about 58° C., about 56° C., about 54° C., about 52° C., about 50° C., about 48° C., about 46° C., about 44° C., or about 42° C. (inclusive); about 42° C. to about 80° C., about 78° C., about 76° C., about 74° C., about 72° C., about 70° C., about 68° C., about 66° C., about 64° C., about 62° C., about 60° C., about 58° C., about 56° C., about 54° C., about 52° C., about 50° C., about 48° C., about 46° C., or about 44° C. (inclusive); about 44° C. to about 80° C., about 78° C., about 76° C., about 74° C., about 72° C., about 70° C., about 68° C., about 66° C., about 64° C., about 62° C., about 60° C., about 58° C., about 56° C., about 54° C., about 52° C., about 50° C., about 48° C., or about 46° C. (inclusive); about 46° C. to about 80° C., about 78° C., about 76° C., about 74° C., about 72° C., about 70° C., about 68° C., about 66° C., about 64° C., about 62° C., about 60° C., about 58° C., about 56° C., about 54° C., about 52° C., about 50° C., or about 48° C. (inclusive); about 48° C. to about 80° C., about 78° C., about 76° C., about 74° C., about 72° C., about 70° C., about 68° C., about 66° C., about 64° C., about 62° C., about 60° C., about 58° C., about 56° C., about 54° C., about 52° C., or about 50° C. (inclusive); about 50° C. to about 80° C., about 78° C., about 76° C., about 74° C., about 72° C., about 70° C., about 68° C., about 66° C., about 64° C., about 62° C., about 60° C., about 58° C., about 56° C., about 54° C., or about 52° C. (inclusive); about 52° C. to about 80° C., about 78° C., about 76° C., about 74° C., about 72° C., about 70° C., about 68° C., about 66° C., about 64° C., about 62° C., about 60° C., about 58° C., about 56° C., or about 54° C. (inclusive); about 54° C. to about 80° C., about 78° C., about 76° C., about 74° C., about 72° C., about 70° C., about 68° C., about 66° C., about 64° C., about 62° C., about 60° C., about 58° C., or about 56° C. (inclusive); about 56° C. to about 80° C., about 78° C., about 76° C., about 74° C., about 72° C., about 70° C., about 68° C., about 66° C., about 64° C., about 62° C., about 60° C., or about 58° C. (inclusive); about 58° C. to about 80° C., about 78° C., about 76° C., about 74° C., about 72° C., about 70° C., about 68° C., about 66° C., about 64° C., about 62° C., or about 60° C. (inclusive); about 60° C. to about 80° C., about 78° C., about 76° C., about 74° C., about 72° C., about 70° C., about 68° C., about 66° C., about 64° C., or about 62° C. (inclusive); about 62° C. to about 80° C., about 78° C., about 76° C., about 74° C., about 72° C., about 70° C., about 68° C., about 66° C., or about 64° C. (inclusive); about 64° C. to about 80° C., about 78° C., about 76° C., about 74° C., about 72° C., about 70° C., about 68° C., or about 66° C. (inclusive); about 66° C. to about 80° C., about 78° C., about 76° C., about 74° C., about 72° C., about 70° C., or about 68° C. (inclusive); about 68° C. to about 80° C., about 78° C., about 76° C., about 74° C., about 72° C., or about 70° C. (inclusive); about 70° C. to about 80° C., about 78° C., about 76° C., about 74° C., or about 72° C. (inclusive); about 72° C. to about 80° C., about 78° C., about 76° C., or about 74° C. (inclusive); about 74° C. to about 80° C., about 78° C., or about 76° C. (inclusive); about 76° C. to about 80° C. or about 78° C. (inclusive); or about 78° C. to about 80° C. (inclusive).

[0647] In some embodiments, the inhibitory nucleic acid can be formulated in a nanoparticle (e.g., a nanoparticle including one or more synthetic polymers, e.g., Patil et al., Pharmaceutical Nanotechnol. 367:195-203, 2009; Yang et al., ACS Appl. Mater. Interfaces, doi: 10.1021/acsami.6b16556, 2017; Perepelyuk et al., Mol. Ther. Nucleic Acids 6:259-268, 2017). In some embodiments, the nanoparticle can be a mucoadhesive particle (e.g., nanoparticles having a positively-charged exterior surface) (Andersen et al., Methods Mol. Biol. 555:77-86, 2009). In some embodiments, the nanoparticle can have a neutrally-charged exterior surface.

[0648] In some embodiments, the inhibitory nucleic acid can be formulated, e.g., as a liposome (Buyens et al., J. Control Release 158(3): 362-370, 2012; Scarabel et al., Expert Opin. Drug Deliv. 17:1-14, 2017), a micelle (e.g., a mixed micelle) (Tangsangasaksri et al., BioMacromolecules 17:246-255, 2016; Wu et al., Nanotechnology, doi: 10.1088/1361-6528/aa6519, 2017), a microemulsion (WO 11/004395), a nanoemulsion, or a solid lipid nanoparticle (Sahay et al., Nature Biotechnol. 31:653-658, 2013; and Lin et al., Nanomedicine 9(1):105-120, 2014). Additional exemplary structural features of inhibitory nucleic acids and formulations of inhibitory nucleic acids are described in US 2016/0090598.

[0649] In some embodiments, a pharmaceutical composition can include a sterile saline solution and one or more inhibitory nucleic acid (e.g., any of the inhibitory nucleic acids described herein). In some examples, a pharmaceutical composition consists of a sterile saline solution and one or more inhibitory nucleic acid (e.g., any of the inhibitory nucleic acids described herein). In certain embodiments, the sterile saline is a pharmaceutical grade saline. In certain embodiments, a pharmaceutical composition can include one or more inhibitory nucleic acid (e.g., any of the inhibitory nucleic acids described herein) and sterile water. In certain embodiments, a pharmaceutical composition consists of one or more inhibitory nucleic acid (e.g., any of the inhibitory nucleic acids described herein) and sterile water. In certain embodiments, a pharmaceutical composition includes one or more inhibitory nucleic acid (e.g., any of the inhibitory nucleic acids described herein) and phosphate-buffered saline (PBS). In certain embodiments, a pharmaceutical composition consists of one or more inhibitory nucleic acids (e.g., any of the inhibitory nucleic acids described herein) and sterile phosphate-buffered saline (PBS). In some examples, the sterile saline is a pharmaceutical grade PBS.

[0650] In certain embodiments, one or more inhibitory nucleic acids (e.g., any of the inhibitory nucleic acids described herein) may be admixed with pharmaceutically acceptable active and/or inert substances for the preparation of pharmaceutical compositions or formulations. Compositions and methods for the formulation of pharmaceutical compositions depend on a number of criteria, including, but not limited to, route of administration, extent of disease, or dose to be administered.

[0651] Pharmaceutical compositions including one or more inhibitory nucleic acids encompass any pharmaceutically acceptable salts, esters, or salts of such esters. Non-limiting examples of pharmaceutical compositions include pharmaceutically acceptable salts of inhibitory nucleic acids. Suitable pharmaceutically acceptable salts include, but are not limited to, sodium and potassium salts.

[0652] Also provided herein are prodrugs that can include additional nucleosides at one or both ends of an inhibitory nucleic acid which are cleaved by endogenous nucleases within the body, to form the active inhibitory nucleic acid.

[0653] Lipid moieties can be used to formulate an inhibitory nucleic acid. In certain such methods, the inhibitory nucleic acid is introduced into preformed liposomes or lipoplexes made of mixtures of cationic lipids and neutral lipids. In certain methods, inhibitory nucleic acid complexes with mono- or poly-cationic lipids are formed without the presence of a neutral lipid. In certain embodiments, a lipid moiety is selected to increase distribution of an inhibitory nucleic acid to a particular cell or tissue in a mammal. In some examples, a lipid moiety is selected to increase distribution of an inhibitory nucleic acid to fat tissue in a mammal. In certain embodiments, a lipid moiety is selected to increase distribution of an inhibitory nucleic acid to muscle tissue.

[0654] In certain embodiments, pharmaceutical compositions provided herein comprise one or more inhibitory nucleic acid and one or more excipients. In certain such embodiments, excipients are selected from water, salt solutions, alcohol, polyethylene glycols, gelatin, lactose, amylase, magnesium stearate, talc, silicic acid, viscous paraffin, hydroxymethylcellulose and polyvinylpyrrolidone.

[0655] In some examples, a pharmaceutical composition provided herein includes liposomes and emulsions. Liposomes and emulsions can be used to formulate hydrophobic compounds. In some examples, certain organic solvents such as dimethylsulfoxide are used.

[0656] In some examples, a pharmaceutical composition provided herein includes one or more tissue-specific delivery molecules designed to deliver one or more inhibitory nucleic acids to specific tissues or cell types in a mammal. For example, a pharmaceutical composition can include liposomes coated with a tissue-specific antibody.

[0657] In some embodiments, a pharmaceutical composition provided herein can include a co-solvent system. Examples of such co-solvent systems include benzyl alcohol, a nonpolar surfactant, a water-miscible organic polymer, and an aqueous phase. A non-limiting example of such a co-solvent system is the VPD co-solvent system, which is a solution of absolute ethanol comprising 3% w/v benzyl alcohol, 8% w/v of the nonpolar surfactant Polysorbate 80™ and 65% w/v polyethylene glycol 300. As can be appreciated, other surfactants may be used instead of Polysorbate 80™; the fraction size of polyethylene glycol may be varied; other biocompatible polymers may replace polyethylene glycol, e.g., polyvinyl pyrrolidone; and other sugars or polysaccharides may substitute for dextrose.

[0658] In some examples, a pharmaceutical composition can be formulated for oral administration. In some examples, pharmaceutical compositions are formulated for buccal administration.

[0659] In some examples, a pharmaceutical composition is formulated for administration by injection (e.g., intravenous, subcutaneous, intramuscular, etc.). In some of these embodiments, a pharmaceutical composition includes a carrier and is formulated in aqueous solution, such as water or physiologically compatible buffers such as Hanks's solution, Ringer's solution, or physiological saline buffer. In some examples, other ingredients are included (e.g., ingredients that aid in solubility or serve as preservatives). In some examples, injectable suspensions are prepared using appropriate liquid carriers, suspending agents, and the like. Some pharmaceutical compositions for injection are formulated in unit dosage form, e.g., in ampoules or in multi-dose containers. Some pharmaceutical compositions for injection are suspensions, solutions, or emulsions in oily or aqueous vehicles, and may contain formulatory agents such as suspending, stabilizing, and/or dispersing agents. Solvents suitable for use in pharmaceutical compositions for injection include, but are not limited to, lipophilic solvents and fatty oils, such as sesame oil, synthetic fatty acid esters, such as ethyl oleate or triglycerides, and liposomes.

### Antibodies

[0660] In some embodiments, the IL-1 inhibitor is an antibody or an antigen-binding fragment thereof (e.g., a Fab or a scFv). In some embodiments, an antibody or antigen-binding fragment described herein binds specifically to any one of IL-1α, IL-1β, IL-18, IL-36α, IL-36β, IL-36γ, IL-38, and IL-33. In some embodiments, an antibody or antigen-binding fragment of an antibody described herein can bind specifically to one or both of IL-1R1 and IL1RAP. In some embodiments, an antibody or antigen-binding fragment of an antibody described herein can bind specifically to IL-18Rα. In some embodiments, an antibody or antigen-binding fragment of an antibody described herein can bind specifically to one or both of IL1RL1 and IL1RAP. In some embodiments, an antibody or antigen-binding fragment of an antibody described herein can bind to one or both of IL-1RL2 and IL-1RAP.

[0661] In some embodiments, the antibody can be a humanized antibody, a chimeric antibody, a multivalent antibody, or a fragment thereof. In some embodiments, an antibody can be a scFv-Fc, a VHH domain, a VNAR domain, a (scFv)₂, a minibody, or a BiTE. In some embodiments, an antibody can be a DVD-Ig, and a dual-affinity re-targeting antibody (DART), a triomab, kih IgG with a common LC, a crossmab, an ortho-Fab IgG, a 2-in-1-IgG, IgG-ScFv, scFv2-Fc, a bi-nanobody, tanden antibody, a DART-Fc, a scFv-HAS-scFv, DNL-Fab3, DAF (two-in-one or four-in-one), DutaMab, DT-IgG, knobs-in-holes common LC, knobs-in-holes assembly, charge pair antibody, Fab-arm exchange antibody, SEEDbody, Triomab, LUZ-Y, Fcab, kλ-body, orthogonal Fab, DVD-IgG, IgG(H)-scFv, scFv-(H)IgG, IgG(L)-scFv, scFv-(L)-IgG, IgG (L,H)-Fc, IgG(H)-V, V(H)—IgG, IgG(L)-V, V(L)-IgG, KIH IgG-scFab, 2scFv-IgG, IgG-2scFv, scFv4-Ig, Zybody, DVI-IgG, nanobody, nanobody-HSA, a diabody, a TandAb, scDiabody, scDiabody-CH3, Diabody-CH3, Triple Body, miniantibody, minibody, TriBi minibody, scFv-CH3 KIH, Fab-scFv, scFv-CH-CL-scFv, F(ab′)2-scFV2, scFv-KIH, Fab-scFv-Fc, tetravalent HCAb, scDiabody-Fc, diabody-Fc, tandem scFv-Fc, intrabody, dock and lock bispecific antibody, ImmTAC, HSAbody, scDiabody-HAS, tandem scFv, IgG-IgG, Cov-X-Body, and scFv1-PEG-scFv2.

[0662] Non-limiting examples of an antigen-binding fragment of an antibody include an Fv fragment, a Fab fragment, a F(ab′)₂ fragment, and a Fab′ fragment. Additional examples of an antigen-binding fragment of an antibody is an antigen-binding fragment of an IgG (e.g., an antigen-binding fragment of IgG1, IgG2, IgG3, or IgG4) (e.g., an antigen-binding fragment of a human or humanized IgG, e.g., human or humanized IgG1, IgG2, IgG3, or IgG4); an antigen-binding fragment of an IgA (e.g., an antigen-binding fragment of IgA1 or IgA2) (e.g., an antigen-binding fragment of a human or humanized IgA, e.g., a human or humanized IgA1 or IgA2); an antigen-binding fragment of an IgD (e.g., an antigen-binding fragment of a human or humanized IgD); an antigen-binding fragment of an IgE (e.g., an antigen-binding fragment of a human or humanized IgE); or an antigen-binding fragment of an IgM (e.g., an antigen-binding fragment of a human or humanized IgM).

[0663] In some embodiments, the IL-1 inhibitor is canakinumab (ACZ885, Ilaris® (Dhimolea, MAbs 2(1): 3-13, 2010; Yokota et al., Clin. Exp. Rheumatol. 2016; Torene et al., Ann. Rheum. Dis. 76(1):303-309, 2017; Gram, Curr. Opin. Chem. Biol. 32:1-9, 2016; Kontzias et al., Semin. Arthritis Rheum 42(2):201-205, 2012). In some embodiments, the IL-1 inhibitor is anakinra (Kineret®; Beynon et al., J. Clin. Rheumatol. 23(3):181-183, 2017; Stanam et al., Oncotarget 7(46):76087-76100, 2016; Nayki et al., J. Obstet Gynaecol. Res. 42(11):1525-1533, 2016; Greenhalgh et al., Dis. ModelMech. 5(6):823-833, 2012), or a variant thereof. In some embodiments, the IL-1 inhibitor is gevokizumab (XOMA 052; Knicklebein et al., Am. J. Ophthalmol. 172:104-110, 2016; Roubille et al., Atherosclerosis 236(2):277-285, 2014; Issafras et al., J. Pharmacol. Exp. Ther. 348(1):202-215, 2014; Handa et al., Obesity 21(2):306-309, 2013; Geiler et al., Curr. Opin. Mol. Ther. 12(6):755-769, 2010), LY2189102 (Bihorel et al., AAPSJ. 16(5):1009-1117, 2014; Sloan-Lancaster et al., Diabetes Care 36(8):2239-2246, 2013), MABp1 (Hickish et al., Lancey Oncol. 18(2):192-201, 2017; Timper et al., J. Diabetes Complications 29(7):955-960, 2015), CDP-484 (Braddock et al., Drug Discov. 3:330-339, 2004), or a variant thereof (Dinarello et al., Nat. Rev. Drug Discov. 11(8): 633-652, 2012).

[0664] Further teachings of IL-1 inhibitors that are antibodies or antigen-binding fragments thereof are described in U.S. Pat. Nos. 5,075,222; 7,446,175; 7,531,166; 7,744,865; 7,829,093; and 8,273,350; US 2016/0326243; US 2016/0194392, and US 2009/0191187, each of which is incorporated by reference in its entirety.

[0665] In some embodiments, any of the antibodies or antigen-binding fragments described herein has a dissociation constant (K_{D}) of less than 1×10⁻⁵ M (e.g., less than 0.5×10⁻⁵ M, less than 1×10⁻⁶ M, less than 0.5×10⁻⁶ M, less than 1×10⁻⁷ M, less than 0.5×10⁻⁷ M, less than 1×10⁻⁸ M, less than 0.5×10⁻⁸ M, less than 1×10⁻⁹ M, less than 0.5×10⁻⁹ M, less than 1×10⁻¹⁰ M, less than 0.5×10⁻¹⁰ M, less than 1×10⁻¹¹ M, less than 0.5×10⁻¹¹ M, or less than 1×10⁻¹²M), e.g., as measured in phosphate buffered saline using surface plasmon resonance (SPR).

[0666] In some embodiments, any of the antibodies or antigen-binding fragments described herein has a K_{D} of about 1×10⁻¹² M to about 1×10−5 M, about 0.5×10⁻⁵ M, about 1×10⁻⁶ M, about 0.5×10⁻⁶ M, about 1×10⁻⁷ M, about 0.5×10⁻⁷ M, about 1×10⁻⁸ M, about 0.5×10⁻⁸ M, about 1×10⁻⁹ M, about 0.5×10⁻⁹ M, about 1×10⁻¹⁰ M, about 0.5×10⁻¹⁰ M, about 1×10⁻¹¹ M, or about 0.5×10⁻¹¹ M (inclusive); about 0.5×10⁻¹¹ M to about 1×10−5 M, about 0.5×10⁻⁵ M, about 1×10⁻⁶ M, about 0.5×10⁻⁶ M, about 1×10⁻⁷ M, about 0.5×10⁻⁷ M, about 1×10⁻⁸ M, about 0.5×10⁻⁸ M, about 1×10⁻⁹ M, about 0.5×10⁻⁹ M, about 1×10⁻¹⁰ M, about 0.5×10⁻¹⁰ M, or about 1×10⁻¹¹ M (inclusive); about 1×10⁻¹¹ M to about 1×10⁻⁵ M, about 0.5×10⁻⁵ M, about 1×10⁻⁶ M, about 0.5×10⁻⁶ M, about 1×10⁻⁷ M, about 0.5×10⁻⁷ M, about 1×10⁻⁸ M, about 0.5×10⁻⁸ M, about 1×10⁻⁹M, about 0.5×10⁻⁹ M, about 1×10⁻¹⁰M, or about 0.5×10⁻¹⁰ M (inclusive); about 0.5×10⁻¹⁰ M to about 1×10−5 M, about 0.5×10⁻⁵ M, about 1×10⁻⁶ M, about 0.5×10⁻⁶ M, about 1×10⁻⁷ M, about 0.5×10⁻⁷ M, about 1×10⁻⁸ M, about 0.5×10⁻⁸ M, about 1×10⁻⁹ M, about 0.5×10⁻⁹ M, or about 1×10⁻¹⁰ M (inclusive); about 1×10⁻¹⁰ M to about 1×10⁻⁵ M, about 0.5×10⁻⁵ M, about 1×10⁻⁶ M, about 0.5×10⁻⁶ M, about 1×10⁻⁷ M, about 0.5×10⁻⁷ M, about 1×10⁻⁸ M, about 0.5×10⁻⁸ M, about 1×10⁻⁹ M, or about 0.5×10⁻⁹ M (inclusive); about 0.5×10⁻⁹ M to about 1×10⁻⁵ M, about 0.5×10⁻⁵ M, about 1×10⁻⁶ M, about 0.5×10⁻⁶ M, about 1×10⁻⁷ M, about 0.5×10⁻⁷ M, about 1×10⁻⁸ M, about 0.5×10⁻⁸ M, or about 1×10⁻⁹ M (inclusive); about 1×10⁻⁹ M to about 1×10⁻⁵ M, about 0.5×10⁻⁵ M, about 1×10⁻⁶ M, about 0.5×10⁻⁶ M, about 1×10⁻⁷ M, about 0.5×10⁻⁷ M, about 1×10⁻⁸ M, or about 0.5×10⁻⁸ M (inclusive); about 0.5×10⁻⁸ M to about 1×10⁻⁵ M, about 0.5×10⁻⁵ M, about 1×10⁻⁶ M, about 0.5×10⁻⁶ M, about 1×10⁻⁷ M, about 0.5×10⁻⁷ M, or about 1×10⁻⁸ M (inclusive); about 1×10⁻⁸ M to about 1×10⁻⁵ M, about 0.5×10⁻⁵ M, about 1×10⁻⁶ M, about 0.5×10⁻⁶ M, about 1×10⁻⁷ M, or about 0.5×10⁻⁷ M (inclusive); about 0.5×10⁻⁷ M to about 1×10⁻⁵ M, about 0.5×10⁻⁵ M, about 1×10⁻⁶ M, about 0.5×10⁻⁶ M, or about 1×10⁻⁷ M (inclusive); about 1×10⁻⁷ M to about 1×10⁻⁵ M, about 0.5×10⁻⁵ M, about 1×10⁻⁶ M, or about 0.5×10⁻⁶ M (inclusive); about 0.5×10⁻⁶ M to about 1×10⁻⁵ M, about 0.5×10⁻⁵ M, or about 1×10⁻⁶ M (inclusive); about 1×10⁻⁶ M to about 1×10⁻⁵ M or about 0.5×10⁻⁵ M (inclusive); or about 0.5×10⁻⁵ M to about 1×10⁻⁵ M (inclusive), e.g., as measured in phosphate buffered saline using surface plasmon resonance (SPR).

[0667] In some embodiments, any of the antibodies or antigen-binding fragments described herein has a K_{off} of about 1×10⁻⁶ s⁻¹ to about 1×10⁻³ s⁻¹, about 0.5×10⁻³ s⁻¹, about 1×10⁻⁴ s⁻¹, about 0.5×10⁻⁴ s⁻¹, about 1×10⁻⁵ s⁻¹, or about 0.5×10⁻⁵ s⁻¹ (inclusive); about 0.5×10⁻⁵ s⁻¹ to about 1×10⁻³ s⁻¹, about 0.5×10⁻³ s⁻¹, about 1×10⁻⁴ s⁻¹, about 0.5×10⁻⁴ s⁻¹, or about 1×10⁻⁵ s⁻¹ (inclusive); about 1×10⁻⁵ s⁻¹ to about 1×10⁻³ s⁻¹, about 0.5×10⁻³ s⁻¹, about 1×10⁻⁴ s⁻¹, or about 0.5×10⁻⁴ s⁻¹ (inclusive); about 0.5×10⁻⁴ s⁻¹ to about 1×10⁻³ s⁻¹, about 0.5×10⁻³ s⁻¹, or about 1×10⁻⁴ s⁻¹ (inclusive); about 1×10⁻⁴ s⁻¹ to about 1×10⁻³ s⁻¹, or about 0.5×10⁻³ s⁻¹ (inclusive); or about 0.5×10⁻⁵ s⁻¹ to about 1×10⁻³ s⁻¹ (inclusive), e.g., as measured in phosphate buffered saline using surface plasmon resonance (SPR).

[0668] In some embodiments, any of the antibodies or antigen-binding fragments described herein has a Kₒₙ of about 1×10² M⁻¹s⁻¹ to about 1×10⁶ M⁻¹s⁻¹, about 0.5×10⁶ M⁻¹s⁻¹, about 1×10⁵ M⁻¹s⁻¹, about 0.5×10⁵ M⁻¹s⁻¹, about 1×10⁴ M⁻¹s⁻¹, about 0.5×10⁴ M⁻¹s⁻¹, about 1×10³ M⁻¹s⁻¹, or about 0.5×10³ M⁻¹s⁻¹(inclusive); about 0.5×10³ M⁻¹s⁻¹ to about 1×10⁶ M⁻¹s⁻¹, about 0.5×10⁶ M⁻¹s⁻¹, about 1×10⁵ M⁻¹s⁻¹, about 0.5×10⁵ M⁻¹s⁻¹, about 1×10⁴ M⁻¹s⁻¹, about 0.5×10⁴ M⁻¹s⁻¹, or about 1×10³ M⁻¹s⁻¹ (inclusive); about 1×10³ M⁻¹s⁻¹ to about 1×10⁶M⁻¹s⁻¹, about 0.5×10⁶ M⁻¹s⁻¹, about 1×10⁵ M⁻¹s⁻¹, about 0.5×10⁵ M⁻¹s⁻¹, about 1×10⁴ M⁻¹s⁻¹, or about 0.5×10⁴ M⁻¹s⁻¹ (inclusive); about 0.5×10⁴ M⁻¹s⁻¹ to about 1×10⁶ M⁻¹s⁻¹, about 0.5×10⁶ M⁻¹s⁻¹, about 1×10⁵ M⁻¹s⁻¹, about 0.5×10⁵ M⁻¹s⁻¹, or about 1×10⁴ M⁻¹s⁻¹ (inclusive); about 1×10⁴ M⁻¹s⁻¹ to about 1×10⁶ M⁻¹s⁻¹, about 0.5×10⁶ M⁻¹s⁻¹, about 1×10⁵ M⁻¹s⁻¹, or about 0.5×10⁵ M⁻¹s⁻¹(inclusive); about 0.5×10⁵ M⁻¹s⁻¹ to about 1×10⁶ M⁻¹s⁻¹, about 0.5×10⁶ M⁻¹s⁻¹, or about 1×10⁵ M⁻¹s⁻¹(inclusive); about 1×10⁵ M⁻¹s⁻¹ to about 1×10⁶M⁻¹s⁻¹, or about 0.5×10⁶ M⁻¹s⁻¹ (inclusive); or about 0.5×10⁶ M⁻¹s⁻¹ to about 1×10⁶ M⁻¹s⁻¹ (inclusive), e.g., as measured in phosphate buffered saline using surface plasmon resonance (SPR).

### Fusion Proteins or Soluble Receptors

[0669] In some embodiments, the IL-1 inhibitor is a fusion protein or a soluble receptor. For example, a fusion can include an extracellular domain of any one of IL-1R1, IL1RAP, IL-18Ra, IL-1RL2, and IL1RL1 fused to a partner amino acid sequence (e.g., a stabilizing domain, e.g., an IgG Fc region, e.g., a human IgG Fc region). In some embodiments, the IL-1 inhibitor is a soluble version of one or both of IL-1RL1 and IL1RAP. In some embodiments, the IL-1 inhibitor is a soluble version of IL-18Rα. In some embodiments, the IL-1 inhibitor is a soluble version of one or both of IL-1RL2 and IL-1RAP.

[0670] In some embodiments, the IL-1 inhibitor is a fusion protein comprising or consisting of rilonacept (IL-1 Trap, Arcalyst®) (see, e.g., Kapur & Bonk, P T 34(3):138-141, 2009; Church et al., Biologics 2(4):733-742, 2008; McDermott, Drugs Today (Barc) 45(6):423-430, 2009). In some embodiments, the IL-1 inhibitor is a fusion protein that is chimeric (e.g., EBI-005 (Isunakinra®) (Furfine et al., Invest. Ophthalmol. Vs. Sci. 53(14):2340-2340, 2012; Goldstein et al., Eye Contact Lens 41(3):145-155, 2015; Goldstein et al., Eye Contact Lens, 2016)).

[0671] In some embodiments, the IL-1 inhibitor is a soluble receptor that comprises or consists of sIL-1RI and/or sIL-1RII (Svenson et al., Eur. J. Immunol. 25(10): 2842-2850, 1995).

### Endogenous IL-I Inhibitor Peptides

[0672] In some embodiments, the IL-1 inhibitor can be an endogenous ligand or an active fragment thereof, e.g., IL-1Ra or IL-36Ra. IL-1Ra is an endogenous soluble protein that decreases the ability of IL-1α and IL-1 to bind to their receptor (e.g., a complex of IL-1R1 and IL1RAP proteins). IL-36Ra is an endogenous soluble protein that decreases the ability of IL-36α, IL-36β, and IL-36γ to bind to their receptor (e.g., a complex of IL-1RL2 and IL-1RAP proteins). Exemplary sequences for IL-1Ra and IL-36Ra are shown below.

```
Human IL-1Ra mRNA Transcript 1
(SEQ ID NO: 126)
      1 atttctttat aaaccacaac tctgggcccg caatggcagt ccactgcctt gctgcagtca
    61 cagaatggaa atctgcagag gcctccgcag tcacctaatc actctcctcc tcttcctgtt
  121 ccattcagag acgatctgcc gaccctctgg gagaaaatcc agcaagatgc aagccttcag
  181 aatctgggat gttaaccaga agaccttcta tctgaggaac aaccaactag ttgctggata
  241 cttgcaagga ccaaatgtca atttagaaga aaagatagat gtggtaccca ttgagcctca
  301 tgctctgttc ttgggaatcc atggagggaa gatgtgcctg tcctgtgtca agtctggtga
  361 tgagaccaga ctccagctgg aggcagttaa catcactgac ctgagcgaga acagaaagca
  421 ggacaagcgc ttcgccttca tccgctcaga cagtggcccc accaccagtt ttgagtctgc
  481 cgcctgcccc ggttggttcc tctgcacagc gatggaagct gaccagcccg tcagcctcac
  541 caatatgcct gacgaaggcg tcatggtcac caaattctac ttccaggagg acgagtagta
  601 ctgcccaggc ctgcctgttc ccattcttgc atggcaagga ctgcagggac tgccagtccc
  661 cctgccccag ggctcccggc tatgggggca ctgaggacca gccattgagg ggtggaccct
  721 cagaaggcgt cacaacaacc tggtcacagg actctgcctc ctcttcaact gaccagcctc
  781 catgctgcct ccagaatggt ctttctaatg tgtgaatcag agcacagcag cccctgcaca
  841 aagcccttcc atgtcgcctc tgcattcagg atcaaacccc gaccacctgc ccaacctgct
  901 ctcctcttgc cactgcctct tcctccctca ttccaccttc ccatgccctg gatccatcag
  961 gccacttgat gacccccaac caagtggctc ccacaccctg ttttacaaaa aagaaaagac
1021 cagtccatga gggaggtttt taagggtttg tggaaaatga aaattaggat ttcatgattt
1081 ttttttttca gtccccgtga aggagagccc ttcatttgga gattatgttc tttcggggag
1141 aggctgagga cttaaaatat tcctgcattt gtgaaatgat ggtgaaagta agtggtagct
1201 tttcccttct ttttcttctt tttttgtgat gtcccaactt gtaaaaatta aaagttatgg
1261 tactatgtta gccccataat tttttttttc cttttaaaac acttccataa tctggactcc
1321 tctgtccagg cactgctgcc cagcctccaa gctccatctc cactccagat tttttacagc
1381 tgcctgcagt actttacctc ctatcagaag tttctcagct cccaaggctc tgagcaaatg
1441 tggctcctgg gggttctttc ttcctctgct gaaggaataa attgctcctt gacattgtag
1501 agcttctggc acttggagac ttgtatgaaa gatggctgtg cctctgcctg tctcccccac
1561 cgggctggga gctctgcaga gcaggaaaca tgactcgtat atgtctcagg tccctgcagg
1621 gccaagcacc tagcctcgct cttggcaggt actcagcgaa tgaatgctgt atatgttggg
1681 tgcaaagttc cctacttcct gtgacttcag ctctgtttta caataaaatc ttgaaaatgc
1741 ctaaaaaaaa aaaaaaaaaa aaaaaaaaaa aaaaaaaaaa aaaaaaaaaa aaaa
Human IL-1Ra mRNA Transcript 2
(SEQ ID NO: 127)
      1 gggcagctcc accctgggag ggactgtggc ccaggtactg cccgggtgct actttatggg
    61 cagcagctca gttgagttag agtctggaag acctcagaag acctcctgtc ctatgaggcc
  121 ctccccatgg ctttagctga cttgtatgaa gaaggaggtg gaggaggagg agaaggtgaa
  181 gacaatgctg actcaaagga gacgatctgc cgaccctctg ggagaaaatc cagcaagatg
  241 caagccttca gaatctggga tgttaaccag aagaccttct atctgaggaa caaccaacta
  301 gttgctggat acttgcaagg accaaatgtc aatttagaag aaaagataga tgtggtaccc
  361 attgagcctc atgctctgtt cttgggaatc catggaggga agatgtgcct gtcctgtgtc
  421 aagtctggtg atgagaccag actccagctg gaggcagtta acatcactga cctgagcgag
  481 aacagaaagc aggacaagcg cttcgccttc atccgctcag acagtggccc caccaccagt
  541 tttgagtctg ccgcctgccc cggttggttc ctctgcacag cgatggaagc tgaccagccc
  601 gtcagcctca ccaatatgcc tgacgaaggc gtcatggtca ccaaattcta cttccaggag
  661 gacgagtagt actgcccagg cctgcctgtt cccattcttg catggcaagg actgcaggga
  721 ctgccagtcc ccctgcccca gggctcccgg ctatgggggc actgaggacc agccattgag
  781 gggtggaccc tcagaaggcg tcacaacaac ctggtcacag gactctgcct cctcttcaac
  841 tgaccagcct ccatgctgcc tccagaatgg tctttctaat gtgtgaatca gagcacagca
  901 gcccctgcac aaagcccttc catgtcgcct ctgcattcag gatcaaaccc cgaccacctg
  961 cccaacctgc tctcctcttg ccactgcctc ttcctccctc attccacctt cccatgccct
1021 ggatccatca ggccacttga tgacccccaa ccaagtggct cccacaccct gttttacaaa
1081 aaagaaaaga ccagtccatg agggaggttt ttaagggttt gtggaaaatg aaaattagga
1141 tttcatgatt tttttttttc agtccccgtg aaggagagcc cttcatttgg agattatgtt
1201 ctttcgggga gaggctgagg acttaaaata ttcctgcatt tgtgaaatga tggtgaaagt
1261 aagtggtagc ttttcccttc tttttcttct ttttttgtga tgtcccaact tgtaaaaatt
1321 aaaagttatg gtactatgtt agccccataa tttttttttt ccttttaaaa cacttccata
1381 atctggactc ctctgtccag gcactgctgc ccagcctcca agctccatct ccactccaga
1441 ttttttacag ctgcctgcag tactttacct cctatcagaa gtttctcagc tcccaaggct
1501 ctgagcaaat gtggctcctg ggggttcttt cttcctctgc tgaaggaata aattgctcct
1561 tgacattgta gagcttctgg cacttggaga cttgtatgaa agatggctgt gcctctgcct
1621 gtctccccca ccgggctggg agctctgcag agcaggaaac atgactcgta tatgtctcag
1681 gtccctgcag ggccaagcac ctagcctcgc tcttggcagg tactcagcga atgaatgctg
1741 tatatgttgg gtgcaaagtt ccctacttcc tgtgacttca gctctgtttt acaataaaat
1801 cttgaaaatg cctaaaaaaa aaaaaaaaaa aaaaaaaaaa aaaaaaaaaa aaaaaaaaaa
1861 aaaaa
Human IL-1Ra mRNA Transcript 3
(SEQ ID NO: 128)
      1 gggcagctcc accctgggag ggactgtggc ccaggtactg cccgggtgct actttatggg
    61 cagcagctca gttgagttag agtctggaag acctcagaag acctcctgtc ctatgaggcc
  121 ctccccatgg ctttagagac gatctgccga ccctctggga gaaaatccag caagatgcaa
  181 gccttcagaa tctgggatgt taaccagaag accttctatc tgaggaacaa ccaactagtt
  241 gctggatact tgcaaggacc aaatgtcaat ttagaagaaa agatagatgt ggtacccatt
  301 gagcctcatg ctctgttctt gggaatccat ggagggaaga tgtgcctgtc ctgtgtcaag
  361 tctggtgatg agaccagact ccagctggag gcagttaaca tcactgacct gagcgagaac
  421 agaaagcagg acaagcgctt cgccttcatc cgctcagaca gtggccccac caccagtttt
  481 gagtctgccg cctgccccgg ttggttcctc tgcacagcga tggaagctga ccagcccgtc
  541 agcctcacca atatgcctga cgaaggcgtc atggtcacca aattctactt ccaggaggac
  601 gagtagtact gcccaggcct gcctgttccc attcttgcat ggcaaggact gcagggactg
  661 ccagtccccc tgccccaggg ctcccggcta tgggggcact gaggaccagc cattgagggg
  721 tggaccctca gaaggcgtca caacaacctg gtcacaggac tctgcctcct cttcaactga
  781 ccagcctcca tgctgcctcc agaatggtct ttctaatgtg tgaatcagag cacagcagcc
  841 cctgcacaaa gcccttccat gtcgcctctg cattcaggat caaaccccga ccacctgccc
  901 aacctgctct cctcttgcca ctgcctcttc ctccctcatt ccaccttccc atgccctgga
  961 tccatcaggc cacttgatga cccccaacca agtggctccc acaccctgtt ttacaaaaaa
1021 gaaaagacca gtccatgagg gaggttttta agggtttgtg gaaaatgaaa attaggattt
1081 catgattttt ttttttcagt ccccgtgaag gagagccctt catttggaga ttatgttctt
1141 tcggggagag gctgaggact taaaatattc ctgcatttgt gaaatgatgg tgaaagtaag
1201 tggtagcttt tcccttcttt ttcttctttt tttgtgatgt cccaacttgt aaaaattaaa
1261 agttatggta ctatgttagc cccataattt tttttttcct tttaaaacac ttccataatc
1321 tggactcctc tgtccaggca ctgctgccca gcctccaagc tccatctcca ctccagattt
1381 tttacagctg cctgcagtac tttacctcct atcagaagtt tctcagctcc caaggctctg
1441 agcaaatgtg gctcctgggg gttctttctt cctctgctga aggaataaat tgctccttga
1501 cattgtagag cttctggcac ttggagactt gtatgaaaga tggctgtgcc tctgcctgtc
1561 tcccccaccg ggctgggagc tctgcagagc aggaaacatg actcgtatat gtctcaggtc
1621 cctgcagggc caagcaccta gcctcgctct tggcaggtac tcagcgaatg aatgctgtat
1681 atgttgggtg caaagttccc tacttcctgt gacttcagct ctgttttaca ataaaatctt
1741 gaaaatgcct aaaaaaaaaa aaaaaaaaaa aaaaaaaaaa aaaaaaaaaa aaaaaaaaaa
1801 aa
Human IL-1Ra mRNA Transcript 4
(SEQ ID NO: 129)
      1 gggcagctcc accctgggag ggactgtggc ccaggtactg cccgggtgct actttatggg
    61 cagcagctca gttgagttag agtctggaag acctcagaag acctcctgtc ctatgaggcc
  121 ctccccatgg ctttaggggg attataaaac taatcatcaa agccaagaag gcaagagcaa
  181 gcatgtaccg ctgaaaacac aagataactg cataagtaat gactttcagt gcagattcat
  241 agctaaccca taaactgctg gggcaaaaat catcttggaa ggctctgaac ctcagaaagg
  301 attcacaaga cgatctgccg accctctggg agaaaatcca gcaagatgca agccttcaga
  361 atctgggatg ttaaccagaa gaccttctat ctgaggaaca accaactagt tgctggatac
  421 ttgcaaggac caaatgtcaa tttagaagaa aagatagatg tggtacccat tgagcctcat
  481 gctctgttct tgggaatcca tggagggaag atgtgcctgt cctgtgtcaa gtctggtgat
  541 gagaccagac tccagctgga ggcagttaac atcactgacc tgagcgagaa cagaaagcag
  601 gacaagcgct tcgccttcat ccgctcagac agtggcccca ccaccagttt tgagtctgcc
  661 gcctgccccg gttggttcct ctgcacagcg atggaagctg accagcccgt cagcctcacc
  721 aatatgcctg acgaaggcgt catggtcacc aaattctact tccaggagga cgagtagtac
  781 tgcccaggcc tgcctgttcc cattcttgca tggcaaggac tgcagggact gccagtcccc
  841 ctgccccagg gctcccggct atgggggcac tgaggaccag ccattgaggg gtggaccctc
  901 agaaggcgtc acaacaacct ggtcacagga ctctgcctcc tcttcaactg accagcctcc
  961 atgctgcctc cagaatggtc tttctaatgt gtgaatcaga gcacagcagc ccctgcacaa
1021 agcccttcca tgtcgcctct gcattcagga tcaaaccccg accacctgcc caacctgctc
1081 tcctcttgcc actgcctctt cctccctcat tccaccttcc catgccctgg atccatcagg
1141 ccacttgatg acccccaacc aagtggctcc cacaccctgt tttacaaaaa agaaaagacc
1201 agtccatgag ggaggttttt aagggtttgt ggaaaatgaa aattaggatt tcatgatttt
1261 tttttttcag tccccgtgaa ggagagccct tcatttggag attatgttct ttcggggaga
1321 ggctgaggac ttaaaatatt cctgcatttg tgaaatgatg gtgaaagtaa gtggtagctt
1381 ttcccttctt tttcttcttt ttttgtgatg tcccaacttg taaaaattaa aagttatggt
1441 actatgttag ccccataatt ttttttttcc ttttaaaaca cttccataat ctggactcct
1501 ctgtccaggc actgctgccc agcctccaag ctccatctcc actccagatt ttttacagct
1561 gcctgcagta ctttacctcc tatcagaagt ttctcagctc ccaaggctct gagcaaatgt
1621 ggctcctggg ggttctttct tcctctgctg aaggaataaa ttgctccttg acattgtaga
1681 gcttctggca cttggagact tgtatgaaag atggctgtgc ctctgcctgt ctcccccacc
1741 gggctgggag ctctgcagag caggaaacat gactcgtata tgtctcaggt ccctgcaggg
1801 ccaagcacct agcctcgctc ttggcaggta ctcagcgaat gaatgctgta tatgttgggt
1861 gcaaagttcc ctacttcctg tgacttcagc tctgttttac aataaaatct tgaaaatgcc
1921 taaaaaaaaa aaaaaaaaaa aaaaaaaaaa aaaaaaaaaa aaaaaaaaaa aaa
Human IL-36Ra mRNA Variant 1
(SEQ ID NO: 130)
      1 cgctgggaat cctgctcctc ctcaggtcct ggcagtttca gggcccctcc ctaggcctta
    61 cttaaaaggc tgaggcatcc ttggaggaac aggcagactc cacagctccc gccaggagaa
  121 aggaacattc tgaggggagt ctacaccctg tggagctcaa gatggtcctg agtggggcgc
  181 tgtgcttccg aatgaaggac tcggcattga aggtgcttta tctgcataat aaccagcttc
  241 tagctggagg gctgcatgca gggaaggtca ttaaaggtga agagatcagc gtggtcccca
  301 atcggtggct ggatgccagc ctgtcccccg tcatcctggg tgtccagggt ggaagccagt
  361 gcctgtcatg tggggtgggg caggagccga ctctaacact agagccagtg aacatcatgg
  421 agctctatct tggtgccaag gaatccaaga gcttcacctt ctaccggcgg gacatggggc
  481 tcacctccag cttcgagtcg gctgcctacc cgggctggtt cctgtgcacg gtgcctgaag
  541 ccgatcagcc tgtcagactc acccagcttc ccgagaatgg tggctggaat gcccccatca
  601 cagacttcta cttccagcag tgtgactagg gcaacgtgcc ccccagaact ccctgggcag
  661 agccagctcg ggtgaggggt gagtggagga gacccatggc ggacaatcac tctctctgct
  721 ctcaggaccc ccacgtctga cttagtgggc acctgaccac tttgtcttct ggttcccagt
  781 ttggataaat tctgagattt ggagctcagt ccacggtcct cccccactgg atggtgctac
  841 tgctgtggaa tcttgtaaaa accatgtggg gtaaactggg aataacatga aaagatttct
  901 gtggaggtgg ggtgggggag tggtgggaat cattcctgct taatggtaac tgaccagtgt
  961 taccctgagc cccgcaggcc aacccatccc cagttgagcc ttatagggtc agtagctctc
1021 cacatgaaga cctgtcactc accactatgc aggagaggga ggtggtcata gagtcaggga
1081 tctatggccc ttggcccagc cccacctcct tccctttaat cctgccactg tcatatgcta
1141 cctttcctat ctcttccctc atcatcttgt tgtgggcatg aggaggtgct gatgtcagaa
1201 gaaatggctc gagctcagaa gataaaagat aagtagggta tgctgatcct cttttaaaaa
1261 cccaagatac aatcaaaatc ccagatgctg gtctctattc ccatgaaaaa gtgctcatga
1321 catattgaga agacctactt acaaagtggc atatattgca atttatttta attaaaagat
1381 acctatttat atatttcttt atagaaaaaa gtctggaaga gtttacttca attgtagcaa
1441 tgtcagggtg gtggcagtat aggtgatttt tcttttaatt ctgttaattt acctgtattt
1501 cctaattttt ctacaatgaa gatgaattcc ttgtataaaa ataagaaaag aaattaatct
1561 tgaggtaagc agagtagaca tcatctctga ttgtcctcag cctccacttc cccagagtaa
1621 attcaaattg aatcgagctc tgctgctctg gttggttgta gtagtgatca ggaaacagat
1681 ctcagcaaag ccactgagga ggaggctgtg ctgagtttgt gtggctggaa tctctgggta
1741 aggaacttaa agaacaaaaa tcatctggta attctttcct agaaggatca cagcccctgg
1801 gattccaagg cattggatcc agtctctaag aaggctgctg tactggttga attgtgtccc
1861 cctcaaattc acatccttct tggaatctca gtctgtgagt ttatttggag ataaggtctc
1921 tgcagatgta gttagttaag acaaggtcat gctggatgaa ggtagaccta aattcaatat
1981 gactggtttc cttgtatgaa aaggagagga cacagagaca gaggagatgc ggggaagact
2041 atgtaaagat gaaggcagag atcggagttt tgcagccaca agctaagaaa caccaaggat
2101 tgtggcaacc atcagaagct tggaagaggc aaagaagaat tcttccctag aggctttaga
2161 gggataacgg ctctgctgaa accttaatct cagacttcca gcctcctgaa cgaagaaaga
2221 ataaatttcg gctgttttaa gccaccaagg ataattggtt acagcagctc taggaaacta
2281 atacagctgc taaaatgatc cctgtctcct cgtgtttaca ttctgtgtgt gtcccctccc
2341 acaatgtacc aaagttgtct ttgtgaccaa tagaatatgg cagaagtgat ggcatgccac
2401 ttccaagatt aggttataaa agacactgca gcttctactt gagccctctc tctctgccac
2461 ccaccgcccc caatctatct tggctcactc gctctggggg aagctagctg ccatgctatg
2521 agcaggccta taaagagact tacgtggtaa aaaatgaagt ctcctgccca cagccacatt
2581 agtgaaccta gaagcagaga ctctgtgaga taatcgatgt ttgttgtttt aagttgctca
2641 gttttggtct aacttgttat gcagcaatag ataaataata tgcagagaaa gagaaaaaaa
2701 aaaaaaaaaa aaaaaaa
Human IL-36Ra mRNA Variant 2
(SEQ ID NO: 131)
      1 ggagagtccc acctctaaca tctcctgtag gcctggcaat ggcaggcagg aaagacagag
    61 gaaggaagga gggagaaggg aaggagtgaa ggaaggagtg aaaaagggga gtctacaccc
  121 tgtggagctc aagatggtcc tgagtggggc gctgtgcttc cgaatgaagg actcggcatt
  181 gaaggtgctt tatctgcata ataaccagct tctagctgga gggctgcatg cagggaaggt
  241 cattaaaggt gaagagatca gcgtggtccc caatcggtgg ctggatgcca gcctgtcccc
  301 cgtcatcctg ggtgtccagg gtggaagcca gtgcctgtca tgtggggtgg ggcaggagcc
  361 gactctaaca ctagagccag tgaacatcat ggagctctat cttggtgcca aggaatccaa
  421 gagcttcacc ttctaccggc gggacatggg gctcacctcc agcttcgagt cggctgccta
  481 cccgggctgg ttcctgtgca cggtgcctga agccgatcag cctgtcagac tcacccagct
  541 tcccgagaat ggtggctgga atgcccccat cacagacttc tacttccagc agtgtgacta
  601 gggcaacgtg ccccccagaa ctccctgggc agagccagct cgggtgaggg gtgagtggag
  661 gagacccatg gcggacaatc actctctctg ctctcaggac ccccacgtct gacttagtgg
  721 gcacctgacc actttgtctt ctggttccca gtttggataa attctgagat ttggagctca
  781 gtccacggtc ctcccccact ggatggtgct actgctgtgg aatcttgtaa aaaccatgtg
  841 gggtaaactg ggaataacat gaaaagattt ctgtggaggt ggggtggggg agtggtggga
  901 atcattcctg cttaatggta actgaccagt gttaccctga gccccgcagg ccaacccatc
  961 cccagttgag ccttataggg tcagtagctc tccacatgaa gacctgtcac tcaccactat
1021 gcaggagagg gaggtggtca tagagtcagg gatctatggc ccttggccca gccccacctc
1081 cttcccttta atcctgccac tgtcatatgc tacctttcct atctcttccc tcatcatctt
1141 gttgtgggca tgaggaggtg ctgatgtcag aagaaatggc tcgagctcag aagataaaag
1201 ataagtaggg tatgctgatc ctcttttaaa aacccaagat acaatcaaaa tcccagatgc
1261 tggtctctat tcccatgaaa aagtgctcat gacatattga gaagacctac ttacaaagtg
1321 gcatatattg caatttattt taattaaaag atacctattt atatatttct ttatagaaaa
1381 aagtctggaa gagtttactt caattgtagc aatgtcaggg tggtggcagt ataggtgatt
1441 tttcttttaa ttctgttaat ttacctgtat ttcctaattt ttctacaatg aagatgaatt
1501 ccttgtataa aaataagaaa agaaattaat cttgaggtaa gcagagtaga catcatctct
1561 gattgtcctc agcctccact tccccagagt aaattcaaat tgaatcgagc tctgctgctc
1621 tggttggttg tagtagtgat caggaaacag atctcagcaa agccactgag gaggaggctg
1681 tgctgagttt gtgtggctgg aatctctggg taaggaactt aaagaacaaa aatcatctgg
1741 taattctttc ctagaaggat cacagcccct gggattccaa ggcattggat ccagtctcta
1801 agaaggctgc tgtactggtt gaattgtgtc cccctcaaat tcacatcctt cttggaatct
1861 cagtctgtga gtttatttgg agataaggtc tctgcagatg tagttagtta agacaaggtc
1921 atgctggatg aaggtagacc taaattcaat atgactggtt tccttgtatg aaaaggagag
1981 gacacagaga cagaggagat gcggggaaga ctatgtaaag atgaaggcag agatcggagt
2041 tttgcagcca caagctaaga aacaccaagg attgtggcaa ccatcagaag cttggaagag
2101 gcaaagaaga attcttccct agaggcttta gagggataac ggctctgctg aaaccttaat
2161 ctcagacttc cagcctcctg aacgaagaaa gaataaattt cggctgtttt aagccaccaa
2221 ggataattgg ttacagcagc tctaggaaac taatacagct gctaaaatga tccctgtctc
2281 ctcgtgttta cattctgtgt gtgtcccctc ccacaatgta ccaaagttgt ctttgtgacc
2341 aatagaatat ggcagaagtg atggcatgcc acttccaaga ttaggttata aaagacactg
2401 cagcttctac ttgagccctc tctctctgcc acccaccgcc cccaatctat cttggctcac
2461 tcgctctggg ggaagctagc tgccatgcta tgagcaggcc tataaagaga cttacgtggt
2521 aaaaaatgaa gtctcctgcc cacagccaca ttagtgaacc tagaagcaga gactctgtga
2581 gataatcgat gtttgttgtt ttaagttgct cagttttggt ctaacttgtt atgcagcaat
2641 agataaataa tatgcagaga aagagaaaaa aaaaaaaaaa aaaaaaaaa
```

### IL-13 Inhibitors

[0673] The term “IL-13 inhibitor” refers to an agent which decreases IL-13 expression and/or decreases the binding of IL-13 to an IL-13 receptor. In some embodiments, the IL-13 inhibitor decreases the ability of IL-13 to bind an IL-13 receptor (e.g., a complex including IL-4Rα and IL-13Rα1, or a complex including IL-13Rα1 and IL-13Rα2).

[0674] In some embodiments, the IL-13 inhibitor targets the IL-4Rα subunit. In some embodiments, the IL-13 inhibitor targets the IL-13Rα1. In some embodiments, the IL-13 inhibitor targets IL-13Rα2. In some embodiments, the IL-13 inhibitor targets an IL-13 receptor including IL-4Rα and IL-13Rα1. In some embodiments, the IL-13 inhibitor targets an IL-13 receptor including IL-13Rα1 and IL-13Rα2. In some embodiments, the IL-13 inhibitor targets IL-13.

[0675] In some embodiments, an IL-13 inhibitor is an inhibitory nucleic acid, an antibody or an antigen-binding fragment thereof, or a fusion protein. In some embodiments, the inhibitory nucleic acid can be an antisense nucleic acid, a ribozyme, a small interfering RNA, a small hairpin RNA, or a microRNA. Examples of aspects of these different inhibitory nucleic acids are described below. Any of the examples of inhibitory nucleic acids that can decrease expression of an IL-13, IL-13Rα1, IL-13Rα2, or IL-4Ra mRNA in a mammalian cell can be synthesized in vitro.

[0676] Inhibitory nucleic acids that can decrease the expression of IL-13, IL-13Rα1, IL-13Rα2, or IL-4Ra mRNA expression in a mammalian cell include antisense nucleic acid molecules, i.e., nucleic acid molecules whose nucleotide sequence is complementary to all or part of an IL-13, IL-13Rα1, IL-13Rα2, or IL-4Rα mRNA (e.g., complementary to all or a part of any one of SEQ ID NOs: 132-138).

| Human IL-13 mRNA | |
|---|---|
| (SEQ ID NO: 132) | |
| 1 | aagccaccca gcctatgcat ccgctcctca atcctctcct gttggcactg ggcctcatgg |
| 61 | cgcttttgtt gaccacggtc attgctctca cttgccttgg cggctttgcc tccccaggcc |
| 121 | ctgtgcctcc ctctacagcc ctcagggagc tcattgagga gctggtcaac atcacccaga |
| 181 | accagaaggc tccgctctgc aatggcagca tggtatggag catcaacctg acagctggca |
| 241 | tgtactgtgc agccctggaa tccctgatca acgtgtcagg ctgcagtgcc atcgagaaga |
| 301 | cccagaggat gctgagcgga ttctgcccgc acaaggtctc agctgggcag ttttccagct |
| 361 | tgcatgtccg agacaccaaa atcgaggtgg cccagtttgt aaaggacctg ctcttacatt |
| 421 | taaagaaact ttttcgcgag ggacagttca actgaaactt cgaaagcatc attatttgca |
| 481 | gagacaggac ctgactattg aagttgcaga ttcatttttc tttctgatgt caaaaatgtc |
| 541 | ttgggtaggc gggaaggagg gttagggagg ggtaaaattc cttagcttag acctcagcct |
| 601 | gtgctgcccg tcttcagcct agccgacctc agccttcccc ttgcccaggg ctcagcctgg |
| 661 | tgggcctcct ctgtccaggg ccctgagctc ggtggaccca gggatgacat gtccctacac |
| 721 | ccctcccctg ccctagagca cactgtagca ttacagtggg tgcccccctt gccagacatg |
| 781 | tggtgggaca gggacccact tcacacacag gcaactgagg cagacagcag ctcaggcaca |
| 841 | cttcttcttg gtcttattta ttattgtgtg ttatttaaat gagtgtgttt gtcaccgttg |
| 901 | gggattgggg aagactgtgg ctgctagcac ttggagccaa gggttcagag actcagggcc |
| 961 | ccagcactaa agcagtggac accaggagtc cctggtaata agtactgtgt acagaattct |
| 1021 | gctacctcac tggggtcctg gggcctcgga gcctcatccg aggcagggtc aggagagggg |
| 1081 | cagaacagcc gctcctgtct gccagccagc agccagctct cagccaacga gtaatttatt |
| 1141 | gtttttcctt gtatttaaat attaaatatg ttagcaaaga gttaatatat agaagggtac |
| 1201 | cttgaacact gggggagggg acattgaaca agttgtttca ttgactatca aactgaagcc |
| 1261 | agaaataaag ttggtgacag at |
| Human IL-13Rα1 mRNA | |
| (SEQ ID NO: 133) | |
| 1 | tgccaaggct ccagcccggc cgggctccga ggcgagaggc tgcatggagt ggccggcgcg |
| 61 | gctctgcggg ctgtgggcgc tgctgctctg cgccggcggc gggggcgggg gcgggggcgc |
| 121 | cgcgcctacg gaaactcagc cacctgtgac aaatttgagt gtctctgttg aaaacctctg |
| 181 | cacagtaata tggacatgga atccacccga gggagccagc tcaaattgta gtctatggta |
| 241 | ttttagtcat tttggcgaca aacaagataa gaaaatagct ccggaaactc gtcgttcaat |
| 301 | agaagtaccc ctgaatgaga ggatttgtct gcaagtgggg tcccagtgta gcaccaatga |
| 361 | gagtgagaag cctagcattt tggttgaaaa atgcatctca cccccagaag gtgatcctga |
| 421 | gtctgctgtg actgagcttc aatgcatttg gcacaacctg agctacatga agtgttcttg |
| 481 | gctccctgga aggaatacca gtcccgacac taactatact ctctactatt ggcacagaag |
| 541 | cctggaaaaa attcatcaat gtgaaaacat ctttagagaa ggccaatact ttggttgttc |
| 601 | ctttgatctg accaaagtga aggattccag ttttgaacaa cacagtgtcc aaataatggt |
| 661 | caaggataat gcaggaaaaa ttaaaccatc cttcaatata gtgcctttaa cttcccgtgt |
| 721 | gaaacctgat cctccacata ttaaaaacct ctccttccac aatgatgacc tatatgtgca |
| 781 | atgggagaat ccacagaatt ttattagcag atgcctattt tatgaagtag aagtcaataa |
| 841 | cagccaaact gagacacata atgttttcta cgtccaagag gctaaatgtg agaatccaga |
| 901 | atttgagaga aatgtggaga atacatcttg tttcatggtc cctggtgttc ttcctgatac |
| 961 | tttgaacaca gtcagaataa gagtcaaaac aaataagtta tgctatgagg atgacaaact |
| 1021 | ctggagtaat tggagccaag aaatgagtat aggtaagaag cgcaattcca cactctacat |
| 1081 | aaccatgtta ctcattgttc cagtcatcgt cgcaggtgca atcatagtac tcctgcttta |
| 1141 | cctaaaaagg ctcaagatta ttatattccc tccaattcct gatcctggca agatttttaa |
| 1201 | agaaatgttt ggagaccaga atgatgatac tctgcactgg aagaagtacg acatctatga |
| 1261 | gaagcaaacc aaggaggaaa ccgactctgt agtgctgata gaaaacctga agaaagcctc |
| 1321 | tcagtgatgg agataattta tttttacctt cactgtgacc ttgagaagat tcttcccatt |
| 1381 | ctccatttgt tatctgggaa cttattaaat ggaaactgaa actactgcac catttaaaaa |
| 1441 | caggcagctc ataagagcca caggtcttta tgttgagtcg cgcaccgaaa aactaaaaat |
| 1501 | aatgggcgct ttggagaaga gtgtggagtc attctcattg aattataaaa gccagcaggc |
| 1561 | ttcaaactag gggacaaagc aaaaagtgat gatagtggtg gagttaatct tatcaagagt |
| 1621 | tgtgacaact tcctgaggga tctatacttg ctttgtgttc tttgtgtcaa catgaacaaa |
| 1681 | ttttatttgt aggggaactc atttggggtg caaatgctaa tgtcaaactt gagtcacaaa |
| 1741 | gaacatgtag aaaacaaaat ggataaaatc tgatatgtat tgtttgggat cctattgaac |
| 1801 | catgtttgtg gctattaaaa ctcttttaac agtctgggct gggtccggtg gctcacgcct |
| 1861 | gtaatcccag caatttggga gtccgaggcg ggcggatcac tcgaggtcag gagttccaga |
| 1921 | ccagcctgac caaaatggtg aaacctcctc tctactaaaa ctacaaaaat taactgggtg |
| 1981 | tggtggcgcg tgcctgtaat cccagctact cgggaagctg aggcaggtga attgtttgaa |
| 2041 | cctgggaggt ggaggttgca gtgagcagag atcacaccac tgcactctag cctgggtgac |
| 2101 | agagcaagac tctgtctaaa aaacaaaaca aaacaaaaca aaacaaaaaa acctcttaat |
| 2161 | attctggagt catcattccc ttcgacagca ttttcctctg ctttgaaagc cccagaaatc |
| 2221 | agtgttggcc atgatgacaa ctacagaaaa accagaggca gcttctttgc caagaccttt |
| 2281 | caaagccatt ttaggctgtt aggggcagtg gaggtagaat gactccttgg gtattagagt |
| 2341 | ttcaaccatg aagtctctaa caatgtattt tcttcacctc tgctactcaa gtagcattta |
| 2401 | ctgtgtcttt ggtttgtgct aggcccccgg gtgtgaagca cagacccctt ccaggggttt |
| 2461 | acagtctatt tgagactcct cagttcttgc cacttttttt tttaatctcc accagtcatt |
| 2521 | tttcagacct tttaactcct caattccaac actgatttcc ccttttgcat tctccctcct |
| 2581 | tcccttcctt gtagcctttt gactttcatt ggaaattagg atgtaaatct gctcaggaga |
| 2641 | cctggaggag cagaggataa ttagcatctc aggttaagtg tgagtaatct gagaaacaat |
| 2701 | gactaattct tgcatatttt gtaacttcca tgtgagggtt ttcagcattg atatttgtgc |
| 2761 | attttctaaa cagagatgag gtggtatctt cacgtagaac attggtattc gcttgagaaa |
| 2821 | aaaagaatag ttgaacctat ttctctttct ttacaagatg ggtccaggat tcctcttttc |
| 2881 | tctgccataa atgattaatt aaatagcttt tgtgtcttac attggtagcc agccagccaa |
| 2941 | ggctctgttt atgcttttgg ggggcatata ttgggttcca ttctcaccta tccacacaac |
| 3001 | atatccgtat atatcccctc tactcttact tcccccaaat ttaaagaagt atgggaaatg |
| 3061 | agaggcattt cccccacccc atttctctcc tcacacacag actcatatta ctggtaggaa |
| 3121 | cttgagaact ttatttccaa gttgttcaaa catttaccaa tcatattaat acaatgatgc |
| 3181 | tatttgcaat tcctgctcct aggggagggg agataagaaa ccctcactct ctacaggttt |
| 3241 | gggtacaagt ggcaacctgc ttccatggcc gtgtagaagc atggtgccct ggcttctctg |
| 3301 | aggaagctgg ggttcatgac aatggcagat gtaaagttat tcttgaagtc agattgaggc |
| 3361 | tgggagacag ccgtagtaga tgttctactt tgttctgctg ttctctagaa agaatatttg |
| 3421 | gttttcctgt ataggaatga gattaattcc tttccaggta ttttataatt ctgggaagca |
| 3481 | aaacccatgc ctccccctag ccatttttac tgttatccta tttagatggc catgaagagg |
| 3541 | atgctgtgaa attcccaaca aacattgatg ctgacagtca tgcagtctgg gagtggggaa |
| 3601 | gtgatctttt gttcccatcc tcttctttta gcagtaaaat agctgaggga aaagggaggg |
| 3661 | aaaaggaagt tatgggaata cctgtggtgg ttgtgatccc taggtcttgg gagctcttgg |
| 3721 | aggtgtctgt atcagtggat ttcccatccc ctgtgggaaa ttagtaggct catttactgt |
| 3781 | tttaggtcta gcctatgtgg attttttcct aacataccta agcaaaccca gtgtcaggat |
| 3841 | ggtaattctt attctttcgt tcagttaagt ttttcccttc atctgggcac tgaagggata |
| 3901 | tgtgaaacaa tgttaacatt tttggtagtc ttcaaccagg gattgtttct gtttaacttc |
| 3961 | ttataggaaa gcttgagtaa aataaatatt gtctttttgt atgtca |
| Human IL-13Rα2 mRNA | |
| (SEQ ID NO: 134) | |
| 1 | gtaagaacac tctcgtgagt ctaacggtct tccggatgaa ggctatttga agtcgccata |
| 61 | acctggtcag aagtgtgcct gtcggcgggg agagaggcaa tatcaaggtt ttaaatctcg |
| 121 | gagaaatggc tttcgtttgc ttggctatcg gatgcttata taccifictg ataagcacaa |
| 181 | catttggctg tacttcatct tcagacaccg agataaaagt taaccctcct caggattttg |
| 241 | agatagtgga tcccggatac ttaggttatc tctatttgca atggcaaccc ccactgtctc |
| 301 | tggatcattt taaggaatgc acagtggaat atgaactaaa ataccgaaac attggtagtg |
| 361 | aaacatggaa gaccatcatt actaagaatc tacattacaa agatgggttt gatcttaaca |
| 421 | agggcattga agcgaagata cacacgcttt taccatggca atgcacaaat ggatcagaag |
| 481 | ttcaaagttc ctgggcagaa actacttatt ggatatcacc acaaggaatt ccagaaacta |
| 541 | aagttcagga tatggattgc gtatattaca attggcaata tttactctgt tcttggaaac |
| 601 | ctggcatagg tgtacttctt gataccaatt acaacttgtt ttactggtat gagggcttgg |
| 661 | atcatgcatt acagtgtgtt gattacatca aggctgatgg acaaaatata ggatgcagat |
| 721 | ttccctattt ggaggcatca gactataaag atttctatat ttgtgttaat ggatcatcag |
| 781 | agaacaagcc tatcagatcc agttatttca cttttcagct tcaaaatata gttaaacctt |
| 841 | tgccgccagt ctatcttact tttactcggg agagttcatg tgaaattaag ctgaaatgga |
| 901 | gcataccttt gggacctatt ccagcaaggt gttttgatta tgaaattgag atcagagaag |
| 961 | atgatactac cttggtgact gctacagttg aaaatgaaac atacaccttg aaaacaacaa |
| 1021 | atgaaacccg acaattatgc tttgtagtaa gaagcaaagt gaatatttat tgctcagatg |
| 1081 | acggaatttg gagtgagtgg agtgataaac aatgctggga aggtgaagac ctatcgaaga |
| 1141 | aaactttgct acgtttctgg ctaccatttg gtttcatctt aatattagtt atatttgtaa |
| 1201 | ccggtctgct tttgcgtaag ccaaacacct acccaaaaat gattccagaa tttttctgtg |
| 1261 | atacatgaag actttccata tcaagagaca tggtattgac tcaacagttt ccagtcatgg |
| 1321 | ccaaatgttc aatatgagtc tcaataaact gaatttttct tgcgaatgtt gaaaaa |
| Human IL-4Rα mRNA Transcript Variant 1 | |
| (SEQ ID NO: 135) | |
| 1 | gggtctccgc gcccaggaaa gccccgcgcg gcgcgggcca gggaagggcc acccaggggt |
| 61 | cccccacttc ccgcttgggc gcccggacgg cgaatggagc aggggcgcgc agataattaa |
| 121 | agatttacac acagctggaa gaaatcatag agaagccggg cgtggtggct catgcctata |
| 181 | atcccagcac ttttggaggc tgaggcgggc agatcacttg agatcaggag ttcgagacca |
| 241 | gcctggtgcc ttggcatctc ccaatggggt ggctttgctc tgggctcctg ttccctgtga |
| 301 | gctgcctggt cctgctgcag gtggcaagct ctgggaacat gaaggtcttg caggagccca |
| 361 | cctgcgtctc cgactacatg agcatctcta cttgcgagtg gaagatgaat ggtcccacca |
| 421 | attgcagcac cgagctccgc ctgttgtacc agctggtttt tctgctctcc gaagcccaca |
| 481 | cgtgtatccc tgagaacaac ggaggcgcgg ggtgcgtgtg ccacctgctc atggatgacg |
| 541 | tggtcagtgc ggataactat acactggacc tgtgggctgg gcagcagctg ctgtggaagg |
| 601 | gctccttcaa gcccagcgag catgtgaaac ccagggcccc aggaaacctg acagttcaca |
| 661 | ccaatgtctc cgacactctg ctgctgacct ggagcaaccc gtatccccct gacaattacc |
| 721 | tgtataatca tctcacctat gcagtcaaca tttggagtga aaacgacccg gcagatttca |
| 781 | gaatctataa cgtgacctac ctagaaccct ccctccgcat cgcagccagc accctgaagt |
| 841 | ctgggatttc ctacagggca cgggtgaggg cctgggctca gtgctataac accacctgga |
| 901 | gtgagtggag ccccagcacc aagtggcaca actcctacag ggagcccttc gagcagcacc |
| 961 | tcctgctggg cgtcagcgtt tcctgcattg tcatcctggc cgtctgcctg ttgtgctatg |
| 1021 | tcagcatcac caagattaag aaagaatggt gggatcagat tcccaaccca gcccgcagcc |
| 1081 | gcctcgtggc tataataatc caggatgctc aggggtcaca gtgggagaag cggtcccgag |
| 1141 | gccaggaacc agccaagtgc ccacactgga agaattgtct taccaagctc ttgccctgtt |
| 1201 | ttctggagca caacatgaaa agggatgaag atcctcacaa ggctgccaaa gagatgcctt |
| 1261 | tccagggctc tggaaaatca gcatggtgcc cagtggagat cagcaagaca gtcctctggc |
| 1321 | cagagagcat cagcgtggtg cgatgtgtgg agttgtttga ggccccggtg gagtgtgagg |
| 1381 | aggaggagga ggtagaggaa gaaaaaggga gcttctgtgc atcgcctgag agcagcaggg |
| 1441 | atgacttcca ggagggaagg gagggcattg tggcccggct aacagagagc ctgttcctgg |
| 1501 | acctgctcgg agaggagaat gggggctttt gccagcagga catgggggag tcatgccttc |
| 1561 | ttccaccttc gggaagtacg agtgctcaca tgccctggga tgagttccca agtgcagggc |
| 1621 | ccaaggaggc acctccctgg ggcaaggagc agcctctcca cctggagcca agtcctcctg |
| 1681 | ccagcccgac ccagagtcca gacaacctga cttgcacaga gacgcccctc gtcatcgcag |
| 1741 | gcaaccctgc ttaccgcagc ttcagcaact ccctgagcca gtcaccgtgt cccagagagc |
| 1801 | tgggtccaga cccactgctg gccagacacc tggaggaagt agaacccgag atgccctgtg |
| 1861 | tcccccagct ctctgagcca accactgtgc cccaacctga gccagaaacc tgggagcaga |
| 1921 | tcctccgccg aaatgtcctc cagcatgggg cagctgcagc ccccgtctcg gcccccacca |
| 1981 | gtggctatca ggagtttgta catgcggtgg agcagggtgg cacccaggcc agtgcggtgg |
| 2041 | tgggcttggg tcccccagga gaggctggtt acaaggcctt ctcaagcctg cttgccagca |
| 2101 | gtgctgtgtc cccagagaaa tgtgggtttg gggctagcag tggggaagag gggtataagc |
| 2161 | ctttccaaga cctcattcct ggctgccctg gggaccctgc cccagtccct gtccccttgt |
| 2221 | tcacctttgg actggacagg gagccacctc gcagtccgca gagctcacat ctcccaagca |
| 2281 | gctccccaga gcacctgggt ctggagccgg gggaaaaggt agaggacatg ccaaagcccc |
| 2341 | cacttcccca ggagcaggcc acagaccccc ttgtggacag cctgggcagt ggcattgtct |
| 2401 | actcagccct tacctgccac ctgtgcggcc acctgaaaca gtgtcatggc caggaggatg |
| 2461 | gtggccagac ccctgtcatg gccagtcctt gctgtggctg ctgctgtgga gacaggtcct |
| 2521 | cgccccctac aacccccctg agggccccag acccctctcc aggtggggtt ccactggagg |
| 2581 | ccagtctgtg tccggcctcc ctggcaccct cgggcatctc agagaagagt aaatcctcat |
| 2641 | catccttcca tcctgcccct ggcaatgctc agagctcaag ccagaccccc aaaatcgtga |
| 2701 | actttgtctc cgtgggaccc acatacatga gggtctctta ggtgcatgtc ctcttgttgc |
| 2761 | tgagtctgca gatgaggact agggcttatc catgcctggg aaatgccacc tcctggaagg |
| 2821 | cagccaggct ggcagatttc caaaagactt gaagaaccat ggtatgaagg tgattggccc |
| 2881 | cactgacgtt ggcctaacac tgggctgcag agactggacc ccgcccagca ttgggctggg |
| 2941 | ctcgccacat cccatgagag tagagggcac tgggtcgccg tgccccacgg caggcccctg |
| 3001 | caggaaaact gaggcccttg ggcacctcga cttgtgaacg agttgttggc tgctccctcc |
| 3061 | acagcttctg cagcagactg tccctgttgt aactgcccaa ggcatgtttt gcccaccaga |
| 3121 | tcatggccca cgtggaggcc cacctgcctc tgtctcactg aactagaagc cgagcctaga |
| 3181 | aactaacaca gccatcaagg gaatgacttg ggcggccttg ggaaatcgat gagaaattga |
| 3241 | acttcaggga gggtggtcat tgcctagagg tgctcattca tttaacagag cttccttagg |
| 3301 | ttgatgctgg aggcagaatc ccggctgtca aggggtgttc agttaagggg agcaacagag |
| 3361 | gacatgaaaa attgctatga ctaaagcagg gacaatttgc tgccaaacac ccatgcccag |
| 3421 | ctgtatggct gggggctcct cgtatgcatg gaacccccag aataaatatg ctcagccacc |
| 3481 | ctgtgggccg ggcaatccag acagcaggca taaggcacca gttaccctgc atgttggccc |
| 3541 | agacctcagg tgctagggaa ggcgggaacc ttgggttgag taatgctcgt ctgtgtgttt |
| 3601 | tagtttcatc acctgttatc tgtgtttgct gaggagagtg gaacagaagg ggtggagttt |
| 3661 | tgtataaata aagtttcttt gtctctttaa aaaaaaaaaa aaaaaaaaaa |
| Human IL-4Rα mRNA Transcript Variant 3 | |
| (SEQ ID NO: 136) | |
| 1 | gggtctccgc gcccaggaaa gccccgcgcg gcgcgggcca gggaagggcc acccaggggt |
| 61 | cccccacttc ccgcttgggc gcccggacgg cgaatggagc aggggcgcgc aggtgccttg |
| 121 | gcatctccca atggggtggc tttgctctgg gctcctgttc cctgtgagct gcctggtcct |
| 181 | gctgcaggtg gcaagctctg ggaacatgaa ggtcttgcag gagcccacct gcgtctccga |
| 241 | ctacatgagc atctctactt gcgagtggaa gatgaatggt cccaccaatt gcagcaccga |
| 301 | gctccgcctg ttgtaccagc tggtttttct gctctccgaa gcccacacgt gtatccctga |
| 361 | gaacaacgga ggcgcggggt gcgtgtgcca cctgctcatg gatgacgtgg tcagtgcgga |
| 421 | taactataca ctggacctgt gggctgggca gcagctgctg tggaagggct ccttcaagcc |
| 481 | cagcgagcat gtgaaaccca gggccccagg aaacctgaca gttcacacca atgtctccga |
| 541 | cactctgctg ctgacctgga gcaacccgta tccccctgac aattacctgt ataatcatct |
| 601 | cacctatgca gtcaacattt ggagtgaaaa cgacccggca gatttcagaa tctataacgt |
| 661 | gacctaccta gaaccctccc tccgcatcgc agccagcacc ctgaagtctg ggatttccta |
| 721 | cagggcacgg gtgagggcct gggctcagtg ctataacacc acctggagtg agtggagccc |
| 781 | cagcaccaag tggcacaact cctacaggga gcccttcgag cagcacctcc tgctgggcgt |
| 841 | cagcgtttcc tgcattgtca tcctggccgt ctgcctgttg tgctatgtca gcatcaccaa |
| 901 | gattaagaaa gaatggtggg atcagattcc caacccagcc cgcagccgcc tcgtggctat |
| 961 | aataatccag gatgctcagg ggtcacagtg ggagaagcgg tcccgaggcc aggaaccagc |
| 1021 | caagtgccca cactggaaga attgtcttac caagctcttg ccctgttttc tggagcacaa |
| 1081 | catgaaaagg gatgaagatc ctcacaaggc tgccaaagag atgcctttcc agggctctgg |
| 1141 | aaaatcagca tggtgcccag tggagatcag caagacagtc ctctggccag agagcatcag |
| 1201 | cgtggtgcga tgtgtggagt tgtttgaggc cccggtggag tgtgaggagg aggaggaggt |
| 1261 | agaggaagaa aaagggagct tctgtgcatc gcctgagagc agcagggatg acttccagga |
| 1321 | gggaagggag ggcattgtgg cccggctaac agagagcctg ttcctggacc tgctcggaga |
| 1381 | ggagaatggg ggcttttgcc agcaggacat gggggagtca tgccttcttc caccttcggg |
| 1441 | aagtacgagt gctcacatgc cctgggatga gttcccaagt gcagggccca aggaggcacc |
| 1501 | tccctggggc aaggagcagc ctctccacct ggagccaagt cctcctgcca gcccgaccca |
| 1561 | gagtccagac aacctgactt gcacagagac gcccctcgtc atcgcaggca accctgctta |
| 1621 | ccgcagcttc agcaactccc tgagccagtc accgtgtccc agagagctgg gtccagaccc |
| 1681 | actgctggcc agacacctgg aggaagtaga acccgagatg ccctgtgtcc cccagctctc |
| 1741 | tgagccaacc actgtgcccc aacctgagcc agaaacctgg gagcagatcc tccgccgaaa |
| 1801 | tgtcctccag catggggcag ctgcagcccc cgtctcggcc cccaccagtg gctatcagga |
| 1861 | gtttgtacat gcggtggagc agggtggcac ccaggccagt gcggtggtgg gcttgggtcc |
| 1921 | cccaggagag gctggttaca aggccttctc aagcctgctt gccagcagtg ctgtgtcccc |
| 1981 | agagaaatgt gggtttgggg ctagcagtgg ggaagagggg tataagcctt tccaagacct |
| 2041 | cattcctggc tgccctgggg accctgcccc agtccctgtc cccttgttca cctttggact |
| 2101 | ggacagggag ccacctcgca gtccgcagag ctcacatctc ccaagcagct ccccagagca |
| 2161 | cctgggtctg gagccggggg aaaaggtaga ggacatgcca aagcccccac ttccccagga |
| 2221 | gcaggccaca gacccccttg tggacagcct gggcagtggc attgtctact cagcccttac |
| 2281 | ctgccacctg tgcggccacc tgaaacagtg tcatggccag gaggatggtg gccagacccc |
| 2341 | tgtcatggcc agtccttgct gtggctgctg ctgtggagac aggtcctcgc cccctacaac |
| 2401 | ccccctgagg gccccagacc cctctccagg tggggttcca ctggaggcca gtctgtgtcc |
| 2461 | ggcctccctg gcaccctcgg gcatctcaga gaagagtaaa tcctcatcat ccttccatcc |
| 2521 | tgcccctggc aatgctcaga gctcaagcca gacccccaaa atcgtgaact ttgtctccgt |
| 2581 | gggacccaca tacatgaggg tctcttaggt gcatgtcctc ttgttgctga gtctgcagat |
| 2641 | gaggactagg gcttatccat gcctgggaaa tgccacctcc tggaaggcag ccaggctggc |
| 2701 | agatttccaa aagacttgaa gaaccatggt atgaaggtga ttggccccac tgacgttggc |
| 2761 | ctaacactgg gctgcagaga ctggaccccg cccagcattg ggctgggctc gccacatccc |
| 2821 | atgagagtag agggcactgg gtcgccgtgc cccacggcag gcccctgcag gaaaactgag |
| 2881 | gcccttgggc acctcgactt gtgaacgagt tgttggctgc tccctccaca gcttctgcag |
| 2941 | cagactgtcc ctgttgtaac tgcccaaggc atgttttgcc caccagatca tggcccacgt |
| 3001 | ggaggcccac ctgcctctgt ctcactgaac tagaagccga gcctagaaac taacacagcc |
| 3061 | atcaagggaa tgacttgggc ggccttggga aatcgatgag aaattgaact tcagggaggg |
| 3121 | tggtcattgc ctagaggtgc tcattcattt aacagagctt ccttaggttg atgctggagg |
| 3181 | cagaatcccg gctgtcaagg ggtgttcagt taaggggagc aacagaggac atgaaaaatt |
| 3241 | gctatgacta aagcagggac aatttgctgc caaacaccca tgcccagctg tatggctggg |
| 3301 | ggctcctcgt atgcatggaa cccccagaat aaatatgctc agccaccctg tgggccgggc |
| 3361 | aatccagaca gcaggcataa ggcaccagtt accctgcatg ttggcccaga cctcaggtgc |
| 3421 | tagggaaggc gggaaccttg ggttgagtaa tgctcgtctg tgtgttttag tttcatcacc |
| 3481 | tgttatctgt gtttgctgag gagagtggaa cagaaggggt ggagttttgt ataaataaag |
| 3541 | tttctttgtc tctttaaaaa aaaaaaaaaa aaaaaaa |
| Human IL-4Rα mRNA Transcript Variant 4 | |
| (SEQ ID NO: 137) | |
| 1 | gggtctccgc gcccaggaaa gccccgcgcg gcgcgggcca gggaagggcc acccaggggt |
| 61 | cccccacttc ccgcttgggc gcccggacgg cgaatggagc aggggcgcgc aggtgccttg |
| 121 | gcatctccca atggggtggc tttgctctgg gctcctgttc cctgtgagct gcctggtcct |
| 181 | gctgcaggtg gcaagctctg gactcttcag gatgccgtgt ggagaaagga agagggtgga |
| 241 | agccaggagg tctggaggga ggtctggagt ggaggagatg agaggctccg gatccctctg |
| 301 | ggaggtagat ttgaggacag attggaattg aggtgaaaga cagagaaaga gaagtggcca |
| 361 | ggatgactcc aagatttctg acctaaacta ctgggaagga cgcggttgtc atttctgaaa |
| 421 | tgcagaagga tgccagaaga gaagggaaca tgaaggtctt gcaggagccc acctgcgtct |
| 481 | ccgactacat gagcatctct acttgcgagt ggaagatgaa tggtcccacc aattgcagca |
| 541 | ccgagctccg cctgttgtac cagctggttt ttctgctctc cgaagcccac acgtgtatcc |
| 601 | ctgagaacaa cggaggcgcg gggtgcgtgt gccacctgct catggatgac gtggtcagtg |
| 661 | cggataacta tacactggac ctgtgggctg ggcagcagct gctgtggaag ggctccttca |
| 721 | agcccagcga gcatgtgaaa cccagggccc caggaaacct gacagttcac accaatgtct |
| 781 | ccgacactct gctgctgacc tggagcaacc cgtatccccc tgacaattac ctgtataatc |
| 841 | atctcaccta tgcagtcaac atttggagtg aaaacgaccc ggcagatttc agaatctata |
| 901 | acgtgaccta cctagaaccc tccctccgca tcgcagccag caccctgaag tctgggattt |
| 961 | cctacagggc acgggtgagg gcctgggctc agtgctataa caccacctgg agtgagtgga |
| 1021 | gccccagcac caagtggcac aactcctaca gggagccctt cgagcagcac ctcctgctgg |
| 1081 | gcgtcagcgt ttcctgcatt gtcatcctgg ccgtctgcct gttgtgctat gtcagcatca |
| 1141 | ccaagattaa gaaagaatgg tgggatcaga ttcccaaccc agcccgcagc cgcctcgtgg |
| 1201 | ctataataat ccaggatgct caggggtcac agtgggagaa gcggtcccga ggccaggaac |
| 1261 | cagccaagtg cccacactgg aagaattgtc ttaccaagct cttgccctgt tttctggagc |
| 1321 | acaacatgaa aagggatgaa gatcctcaca aggctgccaa agagatgcct ttccagggct |
| 1381 | ctggaaaatc agcatggtgc ccagtggaga tcagcaagac agtcctctgg ccagagagca |
| 1441 | tcagcgtggt gcgatgtgtg gagttgtttg aggccccggt ggagtgtgag gaggaggagg |
| 1501 | aggtagagga agaaaaaggg agcttctgtg catcgcctga gagcagcagg gatgacttcc |
| 1561 | aggagggaag ggagggcatt gtggcccggc taacagagag cctgttcctg gacctgctcg |
| 1621 | gagaggagaa tgggggcttt tgccagcagg acatggggga gtcatgcctt cttccacctt |
| 1681 | cgggaagtac gagtgctcac atgccctggg atgagttccc aagtgcaggg cccaaggagg |
| 1741 | cacctccctg gggcaaggag cagcctctcc acctggagcc aagtcctcct gccagcccga |
| 1801 | cccagagtcc agacaacctg acttgcacag agacgcccct cgtcatcgca ggcaaccctg |
| 1861 | cttaccgcag cttcagcaac tccctgagcc agtcaccgtg tcccagagag ctgggtccag |
| 1921 | acccactgct ggccagacac ctggaggaag tagaacccga gatgccctgt gtcccccagc |
| 1981 | tctctgagcc aaccactgtg ccccaacctg agccagaaac ctgggagcag atcctccgcc |
| 2041 | gaaatgtcct ccagcatggg gcagctgcag cccccgtctc ggcccccacc agtggctatc |
| 2101 | aggagtttgt acatgcggtg gagcagggtg gcacccaggc cagtgcggtg gtgggcttgg |
| 2161 | gtcccccagg agaggctggt tacaaggcct tctcaagcct gcttgccagc agtgctgtgt |
| 2221 | ccccagagaa atgtgggttt ggggctagca gtggggaaga ggggtataag cctttccaag |
| 2281 | acctcattcc tggctgccct ggggaccctg ccccagtccc tgtccccttg ttcacctttg |
| 2341 | gactggacag ggagccacct cgcagtccgc agagctcaca tctcccaagc agctccccag |
| 2401 | agcacctggg tctggagccg ggggaaaagg tagaggacat gccaaagccc ccacttcccc |
| 2461 | aggagcaggc cacagacccc cttgtggaca gcctgggcag tggcattgtc tactcagccc |
| 2521 | ttacctgcca cctgtgcggc cacctgaaac agtgtcatgg ccaggaggat ggtggccaga |
| 2581 | cccctgtcat ggccagtcct tgctgtggct gctgctgtgg agacaggtcc tcgcccccta |
| 2641 | caacccccct gagggcccca gacccctctc caggtggggt tccactggag gccagtctgt |
| 2701 | gtccggcctc cctggcaccc tcgggcatct cagagaagag taaatcctca tcatccttcc |
| 2761 | atcctgcccc tggcaatgct cagagctcaa gccagacccc caaaatcgtg aactttgtct |
| 2821 | ccgtgggacc cacatacatg agggtctctt aggtgcatgt cctcttgttg ctgagtctgc |
| 2881 | agatgaggac tagggcttat ccatgcctgg gaaatgccac ctcctggaag gcagccaggc |
| 2941 | tggcagattt ccaaaagact tgaagaacca tggtatgaag gtgattggcc ccactgacgt |
| 3001 | tggcctaaca ctgggctgca gagactggac cccgcccagc attgggctgg gctcgccaca |
| 3061 | tcccatgaga gtagagggca ctgggtcgcc gtgccccacg gcaggcccct gcaggaaaac |
| 3121 | tgaggccctt gggcacctcg acttgtgaac gagttgttgg ctgctccctc cacagcttct |
| 3181 | gcagcagact gtccctgttg taactgccca aggcatgttt tgcccaccag atcatggccc |
| 3241 | acgtggaggc ccacctgcct ctgtctcact gaactagaag ccgagcctag aaactaacac |
| 3301 | agccatcaag ggaatgactt gggcggcctt gggaaatcga tgagaaattg aacttcaggg |
| 3361 | agggtggtca ttgcctagag gtgctcattc atttaacaga gcttccttag gttgatgctg |
| 3421 | gaggcagaat cccggctgtc aaggggtgtt cagttaaggg gagcaacaga ggacatgaaa |
| 3481 | aattgctatg actaaagcag ggacaatttg ctgccaaaca cccatgccca gctgtatggc |
| 3541 | tgggggctcc tcgtatgcat ggaaccccca gaataaatat gctcagccac cctgtgggcc |
| 3601 | gggcaatcca gacagcaggc ataaggcacc agttaccctg catgttggcc cagacctcag |
| 3661 | gtgctaggga aggcgggaac cttgggttga gtaatgctcg tctgtgtgtt ttagtttcat |
| 3721 | cacctgttat ctgtgtttgc tgaggagagt ggaacagaag gggtggagtt ttgtataaat |
| 3781 | aaagtttctt tgtctcttta aaaaaaaaaa aaaaaaaaaa a |
| Human IL-4Rα mRNA Transcript Variant 5 | |
| (SEQ ID NO: 138) | |
| 1 | gggtctccgc gcccaggaaa gccccgcgcg gcgcgggcca gggaagggcc acccaggggt |
| 61 | cccccacttc ccgcttgggc gcccggacgg cgaatggagc aggggcgcgc aggtgccttg |
| 121 | gcatctccca atggggtggc tttgctctgg gctcctgttc cctgtgagct gcctggtcct |
| 181 | gctgcaggtg gcaagctctg ggaacatgaa ggtcttgcag gagcccacct gcgtctccga |
| 241 | ctacatgagc atctctactt gcgagtggaa gatgaatggt cccaccaatt gcagcaccga |
| 301 | gctccgcctg ttgtaccagc tggtttttct gctctccgaa gcccacacgt gtatccctga |
| 361 | gaacaacgga ggcgcggggt gcgtgtgcca cctgctcatg gatgacgtgg tcagtgcgga |
| 421 | taactataca ctggacctgt gggctgggca gcagctgctg tggaagggct ccttcaagcc |
| 481 | cagcgagcat gtgaaaccca gggccccagg aaacctgaca gttcacacca atgtctccga |
| 541 | cactctgctg ctgacctgga gcaacccgta tccccctgac aattacctgt ataatcatct |
| 601 | cacctatgca gtcaacattt ggagtgaaaa cgacccggca gataatctat aacgtgacct |
| 661 | acctagaacc ctccctccgc atcgcagcca gcaccctgaa gtctgggatt tcctacaggg |
| 721 | cacgggtgag ggcctgggct cagtgctata acaccacctg gagtgagtgg agccccagca |
| 781 | ccaagtggca caactcctac agggagccct tcgagcagca cctcctgctg ggcgtcagcg |
| 841 | tttcctgcat tgtcatcctg gccgtctgcc tgttgtgcta tgtcagcatc accaagatta |
| 901 | agaaagaatg gtgggatcag attcccaacc cagcccgcag ccgcctcgtg gctataataa |
| 961 | tccaggatgc tcaggggtca cagtgggaga agcggtcccg aggccaggaa ccagccaagt |
| 1021 | gcccacactg gaagaattgt cttaccaagc tcttgccctg ttttctggag cacaacatga |
| 1081 | aaagggatga agatcctcac aaggctgcca aagagatgcc tttccagggc tctggaaaat |
| 1141 | cagcatggtg cccagtggag atcagcaaga cagtcctctg gccagagagc atcagcgtgg |
| 1201 | tgcgatgtgt ggagttgttt gaggccccgg tggagtgtga ggaggaggag gaggtagagg |
| 1261 | aagaaaaagg gagcttctgt gcatcgcctg agagcagcag ggatgacttc caggagggaa |
| 1321 | gggagggcat tgtggcccgg ctaacagaga gcctgttcct ggacctgctc ggagaggaga |
| 1381 | atgggggctt ttgccagcag gacatggggg agtcatgcct tcttccacct tcgggaagta |
| 1441 | cgagtgctca catgccctgg gatgagttcc caagtgcagg gcccaaggag gcacctccct |
| 1501 | ggggcaagga gcagcctctc cacctggagc caagtcctcc tgccagcccg acccagagtc |
| 1561 | cagacaacct gacttgcaca gagacgcccc tcgtcatcgc aggcaaccct gcttaccgca |
| 1621 | gcttcagcaa ctccctgagc cagtcaccgt gtcccagaga gctgggtcca gacccactgc |
| 1681 | tggccagaca cctggaggaa gtagaacccg agatgccctg tgtcccccag ctctctgagc |
| 1741 | caaccactgt gccccaacct gagccagaaa cctgggagca gatcctccgc cgaaatgtcc |
| 1801 | tccagcatgg ggcagctgca gcccccgtct cggcccccac cagtggctat caggagtttg |
| 1861 | tacatgcggt ggagcagggt ggcacccagg ccagtgcggt ggtgggcttg ggtcccccag |
| 1921 | gagaggctgg ttacaaggcc ttctcaagcc tgcttgccag cagtgctgtg tccccagaga |
| 1981 | aatgtgggtt tggggctagc agtggggaag aggggtataa gcctttccaa gacctcattc |
| 2041 | ctggctgccc tggggaccct gccccagtcc ctgtcccctt gttcaccttt ggactggaca |
| 2101 | gggagccacc tcgcagtccg cagagctcac atctcccaag cagctcccca gagcacctgg |
| 2161 | gtctggagcc gggggaaaag gtagaggaca tgccaaagcc cccacttccc caggagcagg |
| 2221 | ccacagaccc ccttgtggac agcctgggca gtggcattgt ctactcagcc cttacctgcc |
| 2281 | acctgtgcgg ccacctgaaa cagtgtcatg gccaggagga tggtggccag acccctgtca |
| 2341 | tggccagtcc ttgctgtggc tgctgctgtg gagacaggtc ctcgccccct acaacccccc |
| 2401 | tgagggcccc agacccctct ccaggtgggg ttccactgga ggccagtctg tgtccggcct |
| 2461 | ccctggcacc ctcgggcatc tcagagaaga gtaaatcctc atcatccttc catcctgccc |
| 2521 | ctggcaatgc tcagagctca agccagaccc ccaaaatcgt gaactttgtc tccgtgggac |
| 2581 | ccacatacat gagggtctct taggtgcatg tcctcttgtt gctgagtctg cagatgagga |
| 2641 | ctagggctta tccatgcctg ggaaatgcca cctcctggaa ggcagccagg ctggcagatt |
| 2701 | tccaaaagac ttgaagaacc atggtatgaa ggtgattggc cccactgacg ttggcctaac |
| 2761 | actgggctgc agagactgga ccccgcccag cattgggctg ggctcgccac atcccatgag |
| 2821 | agtagagggc actgggtcgc cgtgccccac ggcaggcccc tgcaggaaaa ctgaggccct |
| 2881 | tgggcacctc gacttgtgaa cgagttgttg gctgctccct ccacagcttc tgcagcagac |
| 2941 | tgtccctgtt gtaactgccc aaggcatgtt ttgcccacca gatcatggcc cacgtggagg |
| 3001 | cccacctgcc tctgtctcac tgaactagaa gccgagccta gaaactaaca cagccatcaa |
| 3061 | gggaatgact tgggcggcct tgggaaatcg atgagaaatt gaacttcagg gagggtggtc |
| 3121 | attgcctaga ggtgctcatt catttaacag agcttcctta ggttgatgct ggaggcagaa |
| 3181 | tcccggctgt caaggggtgt tcagttaagg ggagcaacag aggacatgaa aaattgctat |
| 3241 | gactaaagca gggacaattt gctgccaaac acccatgccc agctgtatgg ctgggggctc |
| 3301 | ctcgtatgca tggaaccccc agaataaata tgctcagcca ccctgtgggc cgggcaatcc |
| 3361 | agacagcagg cataaggcac cagttaccct gcatgttggc ccagacctca ggtgctaggg |
| 3421 | aaggcgggaa ccttgggttg agtaatgctc gtctgtgtgt tttagtttca tcacctgtta |
| 3481 | tctgtgtttg ctgaggagag tggaacagaa ggggtggagt tttgtataaa taaagtttct |
| 3541 | ttgtctcttt aaaaaaaaaa aaaaaaaaaa aaaaaaaaaa aaaaaaaaa |

[0677] An antisense nucleic acid molecule can be complementary to all or part of a non-coding region of the coding strand of a nucleotide sequence encoding an IL-13, IL-13Rα1, IL-13Rα2, or IL-4Rα protein. Non-coding regions (5′ and 3′ untranslated regions) are the 5′ and 3′ sequences that flank the coding region in a gene and are not translated into amino acids.

[0678] Based upon the sequences disclosed herein, one of skill in the art can easily choose and synthesize any of a number of appropriate antisense nucleic acids to target a nucleic acid encoding an IL-13, IL-13Rα1, IL-13Rα2, or IL-4Rα protein described herein. Antisense nucleic acids targeting a nucleic acid encoding an IL-13, IL-13Rα1, IL-13Rα2, or IL-4Rα protein can be designed using the software available at the Integrated DNA Technologies website.

[0679] An antisense nucleic acid can be, for example, about 5, 10, 15, 20, 25, 30, 35, 40, 45, or 50 nucleotides or more in length. An antisense oligonucleotide can be constructed using chemical synthesis and enzymatic ligation reactions using procedures known in the art. For example, an antisense nucleic acid can be chemically synthesized using naturally occurring nucleotides or variously modified nucleotides designed to increase the biological stability of the molecules or to increase the physical stability of the duplex formed between the antisense and sense nucleic acids, e.g., phosphorothioate derivatives and acridine substituted nucleotides can be used.

[0680] Examples of modified nucleotides which can be used to generate an antisense nucleic acid include 5-fluorouracil, 5-bromouracil, 5-chlorouracil, 5-iodouracil, hypoxanthine, xanthine, 4-acetylcytosine, 5-(carboxyhydroxylmethyl) uracil, 5-carboxymethylaminomethyl-2-thiouridine, 5-carboxymethylaminomethyluracil, dihydrouracil, beta-D-galactosylqueosine, inosine, N6-isopentenyladenine, 1-methylguanine, 1-methylinosine, 2,2-dimethylguanine, 2-methyladenine, 2-methylguanine, 3-methylcytosine, 5-methylcytosine, N6-adenine, 7-methylguanine, 5-methylaminomethyluracil, 5-methoxyaminomethyl-2-thiouracil, beta-D-mannosylqueosine, 5′-methoxycarboxymethyluracil, 5-methoxyuracil, 2-methylthio-N6-isopentenyladenine, uracil-5-oxyacetic acid (v), wybutoxosine, pseudouracil, queosine, 2-thiocytosine, 5-methyl-2-thiouracil, 2-thiouracil, 4-thiouracil, 5-methyluracil, uracil-5-oxyacetic acid methylester, uracil-5-oxyacetic acid (v), 5-methyl-2-thiouracil, 3-(3-amino-3-N-2-carboxypropyl) uracil, (acp3)w, and 2,6-diaminopurine. Alternatively, the antisense nucleic acid can be produced biologically using an expression vector into which a nucleic acid has been subcloned in an antisense orientation (i.e., RNA transcribed from the inserted nucleic acid will be of an antisense orientation to a target nucleic acid of interest).

[0681] The antisense nucleic acid molecules described herein can be prepared in vitro and administered to a mammal, e.g., a human. Alternatively, they can be generated in situ such that they hybridize with or bind to cellular mRNA and/or genomic DNA encoding an IL-13, IL-13Rα1, IL-13Rα2, or IL-4Rα protein to thereby inhibit expression, e.g., by inhibiting transcription and/or translation. The hybridization can be by conventional nucleotide complementarities to form a stable duplex, or, for example, in the case of an antisense nucleic acid molecule that binds to DNA duplexes, through specific interactions in the major groove of the double helix. The antisense nucleic acid molecules can be delivered to a mammalian cell using a vector (e.g., a lentivirus, a retrovirus, or an adenovirus vector).

[0682] An antisense nucleic acid can be an α-anomeric nucleic acid molecule. An α-anomeric nucleic acid molecule forms specific double-stranded hybrids with complementary RNA in which, contrary to the usual, 0-units, the strands run parallel to each other (Gaultier et al., Nucleic Acids Res. 15:6625-6641, 1987). The antisense nucleic acid can also comprise a 2′-O-methylribonucleotide (Inoue et al., Nucleic Acids Res. 15:6131-6148, 1987) or a chimeric RNA-DNA analog (Inoue et al., FEBS Lett. 215:327-330, 1987).

[0683] Non-limiting examples of IL-13 inhibitors that are antisense nucleic acids are described in Kim et al., J. Gene Med. 11(1): 26-37, 2009; and Mousavi et al., Iran J. Allergy Asthma Immunol. 2(3): 131-137, 2003.

[0684] Another example of an inhibitory nucleic acid is a ribozyme that has specificity for a nucleic acid encoding an IL-13, IL-13Rα1, IL-13Rα2, or IL-4Rα protein (e.g., specificity for an IL-13, IL-13Rα1, IL-13Rα2, or IL-4Rα mRNA, e.g., specificity for any one of SEQ ID NOs: 109-115). Ribozymes are catalytic RNA molecules with ribonuclease activity that are capable of cleaving a single-stranded nucleic acid, such as an mRNA, to which they have a complementary region. Thus, ribozymes (e.g., hammerhead ribozymes (described in Haselhoff and Gerlach, Nature 334:585-591, 1988)) can be used to catalytically cleave mRNA transcripts to thereby inhibit translation of the protein encoded by the mRNA. A ribozyme having specificity for an IL-13, IL-13Rα1, IL-13Rα2, or IL-4Rα mRNA can be designed based upon the nucleotide sequence of any of the IL-13, IL-13Rα1, IL-13Rα2, or IL-4Rα mRNA sequences disclosed herein. For example, a derivative of a Tetrahymena L-19 IVS RNA can be constructed in which the nucleotide sequence of the active site is complementary to the nucleotide sequence to be cleaved in an IL-13, IL-13Rα1, IL-13Rα2, or IL-4Rα mRNA (see, e.g., U.S. Pat. Nos. 4,987,071 and 5,116,742). Alternatively, an IL-13, IL-13Rα1, IL-13Rα2, or IL-4Rα mRNA can be used to select a catalytic RNA having a specific ribonuclease activity from a pool of RNA molecules. See, e.g., Bartel et al., Science 261:1411-1418, 1993.

[0685] An inhibitory nucleic acid can also be a nucleic acid molecule that forms triple helical structures. For example, expression of an IL-13, IL-13Rα1, IL-13Rα2, or IL-4Rα polypeptide can be inhibited by targeting nucleotide sequences complementary to the regulatory region of the gene encoding the IL-13, IL-13Rα1, IL-13Rα2, or IL-4Rα polypeptide (e.g., the promoter and/or enhancer, e.g., a sequence that is at least 1 kb, 2 kb, 3 kb, 4 kb, or 5 kb upstream of the transcription initiation start state) to form triple helical structures that prevent transcription of the gene in target cells. See generally Helene, Anticancer Drug Des. 6(6):569-84, 1991; Helene, Ann. N.Y. Acad. Sci. 660:27-36, 1992; and Maher, Bioassays 14(12):807-15, 1992.

[0686] In various embodiments, inhibitory nucleic acids can be modified at the base moiety, sugar moiety, or phosphate backbone to improve, e.g., the stability, hybridization, or solubility of the molecule. For example, the deoxyribose phosphate backbone of the nucleic acids can be modified to generate peptide nucleic acids (see, e.g., Hyrup et al., Bioorganic Medicinal Chem. 4(1):5-23, 1996). Peptide nucleic acids (PNAs) are nucleic acid mimics, e.g., DNA mimics, in which the deoxyribose phosphate backbone is replaced by a pseudopeptide backbone and only the four natural nucleobases are retained. The neutral backbone of PNAs allows for specific hybridization to DNA and RNA under conditions of low ionic strength. The synthesis of PNA oligomers can be performed using standard solid phase peptide synthesis protocols (see, e.g., Perry-O'Keefe et al., Proc. Nat. Acad. Sci. U.S.A. 93:14670-675, 1996). PNAs can be used as antisense or antigene agents for sequence-specific modulation of gene expression by, e.g., inducing transcription or translation arrest or inhibiting replication.

[0687] PNAs can be modified, e.g., to enhance their stability or cellular uptake, by attaching lipophilic or other helper groups to PNA, by the formation of PNA-DNA chimeras, or by the use of liposomes or other techniques of drug delivery known in the art. For example, PNA-DNA chimeras can be generated which may combine the advantageous properties of PNA and DNA. Such chimeras allow DNA recognition enzymes, e.g., RNAse H and DNA polymerases, to interact with the DNA portion while the PNA portion would provide high binding affinity and specificity. PNA-DNA chimeras can be linked using linkers of appropriate lengths selected in terms of base stacking, number of bonds between the nucleobases, and orientation.

[0688] The synthesis of PNA-DNA chimeras can be performed as described in Finn et al., Nucleic Acids Res. 24:3357-63, 1996. For example, a DNA chain can be synthesized on a solid support using standard phosphoramidite coupling chemistry and modified nucleoside analogs. Compounds such as 5′-(4-methoxytrityl)amino-5′-deoxy-thymidine phosphoramidite can be used as a link between the PNA and the 5′ end of DNA (Mag et al., Nucleic Acids Res. 17:5973-88, 1989). PNA monomers are then coupled in a stepwise manner to produce a chimeric molecule with a 5′ PNA segment and a 3′ DNA segment (Finn et al., Nucleic Acids Res. 24:3357-63, 1996). Alternatively, chimeric molecules can be synthesized with a 5′ DNA segment and a 3′ PNA segment (Peterser et al., Bioorganic Med. Chem. Lett. 5:1119-11124, 1975).

[0689] In some embodiments, the inhibitory nucleic acids can include other appended groups such as peptides, or agents facilitating transport across the cell membrane (see, Letsinger et al., Proc. Nat. Acad. Sci. U.S.A. 86:6553-6556, 1989; Lemaitre et al., Proc. Nat. Acad. Sci. U.S.A. 84:648-652, 1989; and WO 88/09810). In addition, the inhibitory nucleic acids can be modified with hybridization-triggered cleavage agents (see, e.g., Krol et al., Bio/Techniques 6:958-976, 1988) or intercalating agents (see, e.g., Zon, Pharm. Res., 5:539-549, 1988). To this end, the oligonucleotide may be conjugated to another molecule, e.g., a peptide, hybridization triggered cross-linking agent, transport agent, hybridization-triggered cleavage agent, etc.

[0690] Another means by which expression of an IL-13, IL-13Rα1, IL-13Rα2, or IL-4Rα mRNA can be decreased in a mammalian cell is by RNA interference (RNAi). RNAi is a process in which mRNA is degraded in host cells. To inhibit an mRNA, double-stranded RNA (dsRNA) corresponding to a portion of the gene to be silenced (e.g., a gene encoding an IL-13, IL-13Rα1, IL-13Rα2, or IL-4Rα polypeptide) is introduced into a mammalian cell. The dsRNA is digested into 21-23 nucleotide-long duplexes called short interfering RNAs (or siRNAs), which bind to a nuclease complex to form what is known as the RNA-induced silencing complex (or RISC). The RISC targets the homologous transcript by base pairing interactions between one of the siRNA strands and the endogenous mRNA. It then cleaves the mRNA about 12 nucleotides from the 3′ terminus of the siRNA (see Sharp et al., Genes Dev. 15:485-490, 2001, and Hammond et al., Nature Rev. Gen. 2:110-119, 2001).

[0691] RNA-mediated gene silencing can be induced in a mammalian cell in many ways, e.g., by enforcing endogenous expression of RNA hairpins (see, Paddison et al., Proc. Natl. Acad. Sci. U.S.A. 99:1443-1448, 2002) or, as noted above, by transfection of small (21-23 nt) dsRNA (reviewed in Caplen, Trends Biotech. 20:49-51, 2002). Methods for modulating gene expression with RNAi are described, e.g., in U.S. Pat. No. 6,506,559 and US 2003/0056235, which are hereby incorporated by reference.

[0692] Standard molecular biology techniques can be used to generate siRNAs. Short interfering RNAs can be chemically synthesized, recombinantly produced, e.g., by expressing RNA from a template DNA, such as a plasmid, or obtained from commercial vendors, such as Dharmacon. The RNA used to mediate RNAi can include synthetic or modified nucleotides, such as phosphorothioate nucleotides. Methods of transfecting cells with siRNA or with plasmids engineered to make siRNA are routine in the art.

[0693] The siRNA molecules used to decrease expression of an IL-13, IL-13Rα1, IL-13Rα2, or IL-4Ra mRNA can vary in a number of ways. For example, they can include a 3′ hydroxyl group and strands of 21, 22, or 23 consecutive nucleotides. They can be blunt ended or include an overhanging end at either the 3′ end, the 5′ end, or both ends. For example, at least one strand of the RNA molecule can have a 3′ overhang from about 1 to about 6 nucleotides (e.g., 1-5, 1-3, 2-4, or 3-5 nucleotides (whether pyrimidine or purine nucleotides) in length. Where both strands include an overhang, the length of the overhangs may be the same or different for each strand.

[0694] To further enhance the stability of the RNA duplexes, the 3′ overhangs can be stabilized against degradation (by, e.g., including purine nucleotides, such as adenosine or guanosine nucleotides or replacing pyrimidine nucleotides by modified analogues (e.g., substitution of uridine 2-nucleotide 3′ overhangs by 2′-deoxythymidine is tolerated and does not affect the efficiency of RNAi). Any siRNA can be used in the methods of decreasing an IL-13, IL-13Rα1, IL-13Rα2, or IL-4Rα mRNA, provided it has sufficient homology to the target of interest (e.g., a sequence present in any one of SEQ ID NOs: 109-115, e.g., a target sequence encompassing the translation start site or the first exon of the mRNA). There is no upper limit on the length of the siRNA that can be used (e.g., the siRNA can range from about 21 base pairs of the gene to the full length of the gene or more (e.g., about 20 to about 30 base pairs, about 50 to about 60 base pairs, about 60 to about 70 base pairs, about 70 to about 80 base pairs, about 80 to about 90 base pairs, or about 90 to about 100 base pairs).

[0695] As described herein, inhibitory nucleic acids preferentially bind (e.g., hybridize) to a nucleic acid encoding IL-13, IL-13Rα1, IL-13Rα2, or IL-4Rα protein to treat allergic diseases (e.g., asthma (Corren et al., N. Engl. J Med. 365: 1088-1098, 2011)), radiation lung injury (Chung et al., Sci. Rep. 6: 39714, 2016), ulcerative colitis (Hua et al., Br. J. Clin. Pharmacol. 80:101-109, 2015), dermatitis (Guttman-Yassky et al., Exp. Opin. Biol. Ther. 13(4):1517, 2013), and chronic obstructive pulmonary disease (COPD) (Walsh et al. (2010) Curr. Opin. Investig Drugs. 11(11):1305-1312, 2010).

[0696] Non-limiting examples of short interfering RNA (siRNA) that are IL-13 inhibitors are described in Lively et al., J. Allergy Clin. Immunol. 121(1):88-94, 2008). Non-limiting examples of short hairpin RNA (shRNA) that are IL-13 inhibitors are described in Lee et al., Hum Gene Ther. 22(5):577-586, 2011, and Shilovskiy et al., Eur. Resp. J. 42:P523, 2013).

[0697] In some embodiments, an inhibitory nucleic acid can be a microRNA. Non-limiting examples of microRNAs that are IL-13 inhibitors are let-7 (Kumar et al., J. Allergy Clin. Immunol. 128(5):1077-1085, 2011).

[0698] In certain embodiments, a therapeutically effective amount of an inhibitory nucleic acid targeting a nucleic acid encoding a IL-13, IL-13Rα1, IL-13Rα2, or IL-4Rα protein can be administered to a subject (e.g., a human subject) in need thereof.

[0699] In some embodiments, the inhibitory nucleic acid can be about 10 nucleotides to about 40 nucleotides (e.g., about 10 to about 30 nucleotides, about 10 to about 25 nucleotides, about 10 to about 20 nucleotides, about 10 to about 15 nucleotides, 10 nucleotides, 11 nucleotides, 12 nucleotides, 13 nucleotides, 14 nucleotides, 15 nucleotides, 16 nucleotides, 17 nucleotides, 18 nucleotides, 19 nucleotides, 20 nucleotides, 21 nucleotides, 22 nucleotides, 23 nucleotides, 24 nucleotides, 25 nucleotides, 26 nucleotides, 27 nucleotides, 28 nucleotides, 29 nucleotides, 30 nucleotides, 31 nucleotides, 32 nucleotides, 33 nucleotides, 34 nucleotides, 35 nucleotides, 36 nucleotides, 37 nucleotides, 38 nucleotides, 39 nucleotides, or 40 nucleotides) in length. One skilled in the art will appreciate that inhibitory nucleic acids may comprise at least one modified nucleic acid at either the 5′ or 3′end of DNA or RNA.

[0700] As is known in the art, the term “thermal melting point (Tm)” refers to the temperature, under defined ionic strength, pH, and inhibitory nucleic acid concentration, at which 50% of the inhibitory nucleic acids complementary to the target sequence hybridize to the target sequence at equilibrium. In some embodiments, an inhibitory nucleic acid can bind specifically to a target nucleic acid under stingent conditions, e.g., those in which the salt concentration is at least about 0.01 to 1.0 M Na ion concentration (or other salts) at pH 7.0 to 8.3 and the temperature is at least about 30° C. for short oligonucleotides (e.g., 10 to 50 nucleotide). Stringent conditions can also be achieved with the addition of destabilizing agents such as formamide.

[0701] In some embodiments of any of the inhibitory nucleic acids described herein, the inhibitory nucleic acid binds to a target nucleic acid (e.g., a nucleic acid encoding any one of IL-13, IL-13Rα1, IL-13Rα2, or IL-4Ra) with a Tm of greater than 20° C., greater than 22° C., greater than 24° C., greater than 26° C., greater than 28° C., greater than 30° C., greater than 32° C., greater than 34° C., greater than 36° C., greater than 38° C., greater than 40° C., greater than 42° C., greater than 44° C., greater than 46° C., greater than 48° C., greater than 50° C., greater than 52° C., greater than 54° C., greater than 56° C., greater than 58° C., greater than 60° C., greater than 62° C., greater than 64° C., greater than 66° C., greater than 68° C., greater than 70° C., greater than 72° C., greater than 74° C., greater than 76° C., greater than 78° C., or greater than 80° C., e.g., as measured in phosphate buffered saline using a UV spectrophotometer.

[0702] In some embodiments of any of the inhibitor nucleic acids described herein, the inhibitory nucleic acid binds to a target nucleic acid (e.g., a nucleic acid encoding any one of IL-13, IL-13Rα1, IL-13Rα2, or IL-4Ra) with a Tm of about 20° C. to about 80° C., about 78° C., about 76° C., about 74° C., about 72° C., about 70° C., about 68° C., about 66° C., about 64° C., about 62° C., about 60° C., about 58° C., about 56° C., about 54° C., about 52° C., about 50° C., about 48° C., about 46° C., about 44° C., about 42° C., about 40° C., about 38° C., about 36° C., about 34° C., about 32° C., about 30° C., about 28° C., about 26° C., about 24° C., or about 22° C. (inclusive); about 22° C. to about 80° C., about 78° C., about 76° C., about 74° C., about 72° C., about 70° C., about 68° C., about 66° C., about 64° C., about 62° C., about 60° C., about 58° C., about 56° C., about 54° C., about 52° C., about 50° C., about 48° C., about 46° C., about 44° C., about 42° C., about 40° C., about 38° C., about 36° C., about 34° C., about 32° C., about 30° C., about 28° C., about 26° C., or about 24° C. (inclusive); about 24° C. to about 80° C., about 78° C., about 76° C., about 74° C., about 72° C., about 70° C., about 68° C., about 66° C., about 64° C., about 62° C., about 60° C., about 58° C., about 56° C., about 54° C., about 52° C., about 50° C., about 48° C., about 46° C., about 44° C., about 42° C., about 40° C., about 38° C., about 36° C., about 34° C., about 32° C., about 30° C., about 28° C., or about 26° C. (inclusive); about 26° C. to about 80° C., about 78° C., about 76° C., about 74° C., about 72° C., about 70° C., about 68° C., about 66° C., about 64° C., about 62° C., about 60° C., about 58° C., about 56° C., about 54° C., about 52° C., about 50° C., about 48° C., about 46° C., about 44° C., about 42° C., about 40° C., about 38° C., about 36° C., about 34° C., about 32° C., about 30° C., or about 28° C. (inclusive); about 28° C. to about 80° C., about 78° C., about 76° C., about 74° C., about 72° C., about 70° C., about 68° C., about 66° C., about 64° C., about 62° C., about 60° C., about 58° C., about 56° C., about 54° C., about 52° C., about 50° C., about 48° C., about 46° C., about 44° C., about 42° C., about 40° C., about 38° C., about 36° C., about 34° C., about 32° C., or about 30° C. (inclusive); about 30° C. to about 80° C., about 78° C., about 76° C., about 74° C., about 72° C., about 70° C., about 68° C., about 66° C., about 64° C., about 62° C., about 60° C., about 58° C., about 56° C., about 54° C., about 52° C., about 50° C., about 48° C., about 46° C., about 44° C., about 42° C., about 40° C., about 38° C., about 36° C., about 34° C., or about 32° C. (inclusive); about 32° C. to about 80° C., about 78° C., about 76° C., about 74° C., about 72° C., about 70° C., about 68° C., about 66° C., about 64° C., about 62° C., about 60° C., about 58° C., about 56° C., about 54° C., about 52° C., about 50° C., about 48° C., about 46° C., about 44° C., about 42° C., about 40° C., about 38° C., about 36° C., or about 34° C. (inclusive); about 34° C. to about 80° C., about 78° C., about 76° C., about 74° C., about 72° C., about 70° C., about 68° C., about 66° C., about 64° C., about 62° C., about 60° C., about 58° C., about 56° C., about 54° C., about 52° C., about 50° C., about 48° C., about 46° C., about 44° C., about 42° C., about 40° C., about 38° C., or about 36° C. (inclusive); about 36° C. to about 80° C., about 78° C., about 76° C., about 74° C., about 72° C., about 70° C., about 68° C., about 66° C., about 64° C., about 62° C., about 60° C., about 58° C., about 56° C., about 54° C., about 52° C., about 50° C., about 48° C., about 46° C., about 44° C., about 42° C., about 40° C., or about 38° C. (inclusive); about 38° C. to about 80° C., about 78° C., about 76° C., about 74° C., about 72° C., about 70° C., about 68° C., about 66° C., about 64° C., about 62° C., about 60° C., about 58° C., about 56° C., about 54° C., about 52° C., about 50° C., about 48° C., about 46° C., about 44° C., about 42° C., or about 40° C. (inclusive); about 40° C. to about 80° C., about 78° C., about 76° C., about 74° C., about 72° C., about 70° C., about 68° C., about 66° C., about 64° C., about 62° C., about 60° C., about 58° C., about 56° C., about 54° C., about 52° C., about 50° C., about 48° C., about 46° C., about 44° C., or about 42° C. (inclusive); about 42° C. to about 80° C., about 78° C., about 76° C., about 74° C., about 72° C., about 70° C., about 68° C., about 66° C., about 64° C., about 62° C., about 60° C., about 58° C., about 56° C., about 54° C., about 52° C., about 50° C., about 48° C., about 46° C., or about 44° C. (inclusive); about 44° C. to about 80° C., about 78° C., about 76° C., about 74° C., about 72° C., about 70° C., about 68° C., about 66° C., about 64° C., about 62° C., about 60° C., about 58° C., about 56° C., about 54° C., about 52° C., about 50° C., about 48° C., or about 46° C. (inclusive); about 46° C. to about 80° C., about 78° C., about 76° C., about 74° C., about 72° C., about 70° C., about 68° C., about 66° C., about 64° C., about 62° C., about 60° C., about 58° C., about 56° C., about 54° C., about 52° C., about 50° C., or about 48° C. (inclusive); about 48° C. to about 80° C., about 78° C., about 76° C., about 74° C., about 72° C., about 70° C., about 68° C., about 66° C., about 64° C., about 62° C., about 60° C., about 58° C., about 56° C., about 54° C., about 52° C., or about 50° C. (inclusive); about 50° C. to about 80° C., about 78° C., about 76° C., about 74° C., about 72° C., about 70° C., about 68° C., about 66° C., about 64° C., about 62° C., about 60° C., about 58° C., about 56° C., about 54° C., or about 52° C. (inclusive); about 52° C. to about 80° C., about 78° C., about 76° C., about 74° C., about 72° C., about 70° C., about 68° C., about 66° C., about 64° C., about 62° C., about 60° C., about 58° C., about 56° C., or about 54° C. (inclusive); about 54° C. to about 80° C., about 78° C., about 76° C., about 74° C., about 72° C., about 70° C., about 68° C., about 66° C., about 64° C., about 62° C., about 60° C., about 58° C., or about 56° C. (inclusive); about 56° C. to about 80° C., about 78° C., about 76° C., about 74° C., about 72° C., about 70° C., about 68° C., about 66° C., about 64° C., about 62° C., about 60° C., or about 58° C. (inclusive); about 58° C. to about 80° C., about 78° C., about 76° C., about 74° C., about 72° C., about 70° C., about 68° C., about 66° C., about 64° C., about 62° C., or about 60° C. (inclusive); about 60° C. to about 80° C., about 78° C., about 76° C., about 74° C., about 72° C., about 70° C., about 68° C., about 66° C., about 64° C., or about 62° C. (inclusive); about 62° C. to about 80° C., about 78° C., about 76° C., about 74° C., about 72° C., about 70° C., about 68° C., about 66° C., or about 64° C. (inclusive); about 64° C. to about 80° C., about 78° C., about 76° C., about 74° C., about 72° C., about 70° C., about 68° C., or about 66° C. (inclusive); about 66° C. to about 80° C., about 78° C., about 76° C., about 74° C., about 72° C., about 70° C., or about 68° C. (inclusive); about 68° C. to about 80° C., about 78° C., about 76° C., about 74° C., about 72° C., or about 70° C. (inclusive); about 70° C. to about 80° C., about 78° C., about 76° C., about 74° C., or about 72° C. (inclusive); about 72° C. to about 80° C., about 78° C., about 76° C., or about 74° C. (inclusive); about 74° C. to about 80° C., about 78° C., or about 76° C. (inclusive); about 76° C. to about 80° C. or about 78° C. (inclusive); or about 78° C. to about 80° C. (inclusive).

[0703] In some embodiments, the inhibitory nucleic acid can be formulated in a nanoparticle (e.g., a nanoparticle including one or more synthetic polymers, e.g., Patil et al., Pharmaceutical Nanotechnol. 367:195-203, 2009; Yang et al., ACS Appl. Mater. Interfaces, doi: 10.1021/acsami.6b16556, 2017; Perepelyuk et al., Mol. Ther. Nucleic Acids 6:259-268, 2017). In some embodiments, the nanoparticle can be a mucoadhesive particle (e.g., nanoparticles having a positively-charged exterior surface) (Andersen et al., Methods Mol. Biol. 555:77-86, 2009). In some embodiments, the nanoparticle can have a neutrally-charged exterior surface.

[0704] In some embodiments, the inhibitory nucleic acid can be formulated, e.g., as a liposome (Buyens et al., J. Control Release 158(3): 362-370, 2012; Scarabel et al., Expert Opin. Drug Deliv. 17:1-14, 2017), a micelle (e.g., a mixed micelle) (Tangsangasaksri et al., BioMacromolecules 17:246-255, 2016; Wu et al., Nanotechnology, doi: 10.1088/1361-6528/aa6519, 2017), a microemulsion (WO 11/004395), a nanoemulsion, or a solid lipid nanoparticle (Sahay et al., Nature Biotechnol. 31:653-658, 2013; and Lin et al., Nanomedicine 9(1):105-120, 2014). Additional exemplary structural features of inhibitory nucleic acids and formulations of inhibitory nucleic acids are described in US 2016/0090598.

[0705] In some embodiments, a pharmaceutical composition can include a sterile saline solution and one or more inhibitory nucleic acid (e.g., any of the inhibitory nucleic acids described herein). In some examples, a pharmaceutical composition consists of a sterile saline solution and one or more inhibitory nucleic acid (e.g., any of the inhibitory nucleic acids described herein). In certain embodiments, the sterile saline is a pharmaceutical grade saline. In certain embodiments, a pharmaceutical composition can include one or more inhibitory nucleic acid (e.g., any of the inhibitory nucleic acids described herein) and sterile water. In certain embodiments, a pharmaceutical composition consists of one or more inhibitory nucleic acid (e.g., any of the inhibitory nucleic acids described herein) and sterile water. In certain embodiments, a pharmaceutical composition includes one or more inhibitory nucleic acid (e.g., any of the inhibitory nucleic acids described herein) and phosphate-buffered saline (PBS). In certain embodiments, a pharmaceutical composition consists of one or more inhibitory nucleic acids (e.g., any of the inhibitory nucleic acids described herein) and sterile phosphate-buffered saline (PBS). In some examples, the sterile saline is a pharmaceutical grade PBS.

[0706] In certain embodiments, one or more inhibitory nucleic acids (e.g., any of the inhibitory nucleic acids described herein) may be admixed with pharmaceutically acceptable active and/or inert substances for the preparation of pharmaceutical compositions or formulations. Compositions and methods for the formulation of pharmaceutical compositions depend on a number of criteria, including, but not limited to, route of administration, extent of disease, or dose to be administered.

[0707] Pharmaceutical compositions including one or more inhibitory nucleic acids encompass any pharmaceutically acceptable salts, esters, or salts of such esters. Non-limiting examples of pharmaceutical compositions include pharmaceutically acceptable salts of inhibitory nucleic acids. Suitable pharmaceutically acceptable salts include, but are not limited to, sodium and potassium salts.

[0708] Also provided herein are prodrugs that can include additional nucleosides at one or both ends of an inhibitory nucleic acid which are cleaved by endogenous nucleases within the body, to form the active inhibitory nucleic acid.

[0709] Lipid moieties can be used to formulate an inhibitory nucleic acid. In certain such methods, the inhibitory nucleic acid is introduced into preformed liposomes or lipoplexes made of mixtures of cationic lipids and neutral lipids. In certain methods, inhibitory nucleic acid complexes with mono- or poly-cationic lipids are formed without the presence of a neutral lipid. In certain embodiments, a lipid moiety is selected to increase distribution of an inhibitory nucleic acid to a particular cell or tissue in a mammal. In some examples, a lipid moiety is selected to increase distribution of an inhibitory nucleic acid to fat tissue in a mammal. In certain embodiments, a lipid moiety is selected to increase distribution of an inhibitory nucleic acid to muscle tissue.

[0710] In certain embodiments, pharmaceutical compositions provided herein comprise one or more inhibitory nucleic acid and one or more excipients. In certain such embodiments, excipients are selected from water, salt solutions, alcohol, polyethylene glycols, gelatin, lactose, amylase, magnesium stearate, talc, silicic acid, viscous paraffin, hydroxymethylcellulose and polyvinylpyrrolidone.

[0711] In some examples, a pharmaceutical composition provided herein includes liposomes and emulsions. Liposomes and emulsions can be used to formulate hydrophobic compounds. In some examples, certain organic solvents such as dimethylsulfoxide are used.

[0712] In some examples, a pharmaceutical composition provided herein includes one or more tissue-specific delivery molecules designed to deliver one or more inhibitory nucleic acids to specific tissues or cell types in a mammal. For example, a pharmaceutical composition can include liposomes coated with a tissue-specific antibody.

[0713] In some embodiments, a pharmaceutical composition provided herein can include a co-solvent system. Examples of such co-solvent systems include benzyl alcohol, a nonpolar surfactant, a water-miscible organic polymer, and an aqueous phase. A non-limiting example of such a co-solvent system is the VPD co-solvent system, which is a solution of absolute ethanol comprising 3% w/v benzyl alcohol, 8% w/v of the nonpolar surfactant Polysorbate 80™ and 65% w/v polyethylene glycol 300. As can be appreciated, other surfactants may be used instead of Polysorbate 80™; the fraction size of polyethylene glycol may be varied; other biocompatible polymers may replace polyethylene glycol, e.g., polyvinyl pyrrolidone; and other sugars or polysaccharides may substitute for dextrose.

[0714] In some examples, a pharmaceutical composition can be formulated for oral administration. In some examples, pharmaceutical compositions are formulated for buccal administration.

[0715] In some examples, a pharmaceutical composition is formulated for administration by injection (e.g., intravenous, subcutaneous, intramuscular, etc.). In some of these embodiments, a pharmaceutical composition includes a carrier and is formulated in aqueous solution, such as water or physiologically compatible buffers such as Hanks's solution, Ringer's solution, or physiological saline buffer. In some examples, other ingredients are included (e.g., ingredients that aid in solubility or serve as preservatives). In some examples, injectable suspensions are prepared using appropriate liquid carriers, suspending agents, and the like. Some pharmaceutical compositions for injection are formulated in unit dosage form, e.g., in ampoules or in multi-dose containers. Some pharmaceutical compositions for injection are suspensions, solutions, or emulsions in oily or aqueous vehicles, and may contain formulatory agents such as suspending, stabilizing, and/or dispersing agents. Solvents suitable for use in pharmaceutical compositions for injection include, but are not limited to, lipophilic solvents and fatty oils, such as sesame oil, synthetic fatty acid esters, such as ethyl oleate or triglycerides, and liposomes.

### Antibodies

[0716] In some embodiments, the IL-13 inhibitor is an antibody or an antigen-binding fragment thereof (e.g., a Fab or a scFv). In some embodiments, an antibody or antigen-binding fragment described herein binds specifically to any one of IL-13, IL-13Rα1, IL-13Rα2, or IL-4Rα, or a combination thereof. In some embodiments, an antibody or antigen-binding fragment of an antibody described herein can bind specifically to IL-13. In some embodiments, an antibody or antigen-binding fragment of an antibody described herein can bind specifically to an IL-13 receptor (e.g., a complex including IL-4Rα and IL-13Rα1, or a complex including IL-13Rα1 and IL-13Rα2).

[0717] In some embodiments, the antibody can be a humanized antibody, a chimeric antibody, a multivalent antibody, or a fragment thereof. In some embodiments, an antibody can be a scFv-Fc, a VHH domain, a VNAR domain, a (scFv)2, a minibody, or a BiTE. In some embodiments, an antibody can be a DVD-Ig, and a dual-affinity re-targeting antibody (DART), a triomab, kih IgG with a common LC, a crossmab, an ortho-Fab IgG, a 2-in-1-IgG, IgG-ScFv, scFv2-Fc, a bi-nanobody, tanden antibody, a DART-Fc, a scFv-HAS-scFv, DNL-Fab3, DAF (two-in-one or four-in-one), DutaMab, DT-IgG, knobs-in-holes common LC, knobs-in-holes assembly, charge pair antibody, Fab-arm exchange antibody, SEEDbody, Triomab, LUZ-Y, Fcab, kλ-body, orthogonal Fab, DVD-IgG, IgG(H)-scFv, scFv-(H)IgG, IgG(L)-scFv, scFv-(L)-IgG, IgG (L,H)-Fc, IgG(H)-V, V(H)—IgG, IgG(L)-V, V(L)-IgG, KIH IgG-scFab, 2scFv-IgG, IgG-2scFv, scFv4-Ig, Zybody, DVI-IgG, nanobody, nanobody-HSA, a diabody, a TandAb, scDiabody, scDiabody-CH3, Diabody-CH3, Triple Body, miniantibody, minibody, TriBi minibody, scFv-CH3 KIH, Fab-scFv, scFv-CH-CL-scFv, F(ab′)2-scFV2, scFv-KIH, Fab-scFv-Fc, tetravalent HCAb, scDiabody-Fc, diabody-Fc, tandem scFv-Fc, intrabody, dock and lock bispecific antibody, ImmTAC, HSAbody, scDiabody-HAS, tandem scFv, IgG-IgG, Cov-X-Body, and scFv1-PEG-scFv2.

[0718] Non-limiting examples of an antigen-binding fragment of an antibody include an Fv fragment, a Fab fragment, a F(ab′)2 fragment, and a Fab′ fragment. Additional examples of an antigen-binding fragment of an antibody is an antigen-binding fragment of an IgG (e.g., an antigen-binding fragment of IgG1, IgG2, IgG3, or IgG4) (e.g., an antigen-binding fragment of a human or humanized IgG, e.g., human or humanized IgG1, IgG2, IgG3, or IgG4); an antigen-binding fragment of an IgA (e.g., an antigen-binding fragment of IgA1 or IgA2) (e.g., an antigen-binding fragment of a human or humanized IgA, e.g., a human or humanized IgA1 or IgA2); an antigen-binding fragment of an IgD (e.g., an antigen-binding fragment of a human or humanized IgD); an antigen-binding fragment of an IgE (e.g., an antigen-binding fragment of a human or humanized IgE); or an antigen-binding fragment of an IgM (e.g., an antigen-binding fragment of a human or humanized IgM).

[0719] In some embodiments, the IL-13 inhibitor is a monoclonal antibody (Bagnasco et al., Int. Arch. Allergy Immunol. 170:122-131, 2016). In some embodiments, the IL-13 inhibitor is QAX576 (Novartis) or an antigen-binding fragment thereof (see, e.g., Kariyawasam et al., B92 New Treatment Approachesfor Asthma and Allergery San Diego, 2009; Rothenberg et al., J. Allergy Clin. Immunol. 135:500-507, 2015). In some embodiments, the IL-13 inhibitor is ABT-308 (Abbott) or an antigen-binding fragment thereof (see, e.g., Ying et al., American Thoracic Society 2010 International Conference, May 14-19, 2010, New Orleans; Abstract A6644). In some embodiments, the IL-13 inhibitor is CNTO-5825 (Centrocore) or an antigen-binding fragment thereof (see, e.g., van Hartingsveldt et al., British J. Clin. Pharmacol. 75:1289-1298, 2013). In some embodiments, the IL-13 inhibitor is dupilumab (REGN668/SAR231893) or an antigen-binding fragment thereof (see, e.g., Simpson et al., N. Eng. J. Med. 375:2335-2348, 2016; Thaci et al., Lancet 387:40-52, 2016). In some embodiments, the IL-13 inhibitor is AMG317 (Amgen) or an antigen-binding fragment thereof (Polosa et al., Drug Discovery Today 17:591-599, 2012; Holgate, British J. Clinical Pharmacol. 76:277-291, 2013). In some embodiments, the IL-13 inhibitor is an antibody that specifically binds to IL-13Rα1 (see, e.g., U.S. Pat. No. 7,807,158; WO 96/29417; WO 97/15663; and WO 03/080675).

[0720] In some embodiments, the IL-13 inhibitor is a humanized monoclonal antibody (e.g., lebrikizumab (TNX-650) (Thomson et al., Biologics 6:329-335, 2012; and Hanania et al., Thorax 70(8):748-756, 2015). In some embodiments, the IL-13 inhibitor is an anti-IL-13 antibody, e.g., GSK679586 or a variant thereof (Hodsman et al., Br. J Clin. Pharmacol. 75(1):118-128, 2013; and De Boever et al., J. Allergy Clin. Immunol. 133(4):989-996, 2014). In some embodiments, the IL-13 inhibitor is tralokinumab (CAT-354) or a variant thereof (Brightling et al., Lancet 3(9): 692-701, 2015; Walsh et al. (2010) Curr. Opin. Investig. Drugs 11(11):1305-1312, 2010; Piper et al., Euro. Resp. J. 41:330-338, 2013; May et al., Br. J. Pharmacol. 166(1): 177-193, 2012; Singh et al., BMC Pulm Med. 10:3, 2010; Blanchard et al., Clin. Exp. Allergy 35(8): 1096-1103, 2005). In some embodiments, the Il-13 inhibitor is anrukinzumab (IMA-638) (Hua et al., Br. J Clin. Pharmacol. 80: 101-109, 2015; Reinisch et al., Gut 64(6): 894-900, 2015; Gauvreau et al., Am. J. Respir. Crit. Care Med. 183(8):1007-1014, 2011; Bree et al., J. Allergy Clin. Immunol. 119(5):1251-1257, 2007). Further teachings of IL-13 inhibitors that are antibodies or antigen-binding fragments thereof are described in U.S. Pat. Nos. 8,067,199; 7,910,708; 8,221,752; 8,388,965; 8,399,630; and 8,734,801; US 2014/0341913; US 2015/0259411; US 2016/0075777; US 2016/0130339, US 2011/0243928, and US 2014/0105897 each of which is incorporated by reference in its entirety.

[0721] In some embodiments, any of the antibodies or antigen-binding fragments described herein has a dissociation constant (K_{D}) of less than 1×10⁻⁵M (e.g., less than 0.5×10⁻⁵ M, less than 1×10⁻⁶ M, less than 0.5×10⁻⁶ M, less than 1×10⁷ M, less than 0.5×10⁻⁷ M, less than 1×10⁻⁸ M, less than 0.5×10⁻⁸ M, less than 1×10⁻⁹ M, less than 0.5×10⁻⁹ M, less than 1×10⁻¹⁰ M, less than 0.5×10⁻¹⁰ M, less than 1×10⁻¹¹ M, less than 0.5×10⁻¹¹ M, or less than 1×10⁻¹²M), e.g., as measured in phosphate buffered saline using surface plasmon resonance (SPR).

[0722] In some embodiments, any of the antibodies or antigen-binding fragments described herein has a K_{D} of about 1×10⁻¹² M to about 1×10⁻⁵ M, about 0.5×10⁻⁵ M, about 1×10⁻⁶ M, about 0.5×10⁻⁶ M, about 1×10⁻⁷ M, about 0.5×10⁻⁷ M, about 1×10⁻⁸ M, about 0.5×10⁻⁸ M, about 1×10⁻⁹ M, about 0.5×10⁻⁹ M, about 1×10⁻¹⁰ M, about 0.5×10⁻¹⁰ M, about 1×10⁻¹¹ M, or about 0.5×10⁻¹¹ M (inclusive); about 0.5×10⁻¹¹ M to about 1×10⁻⁵ M, about 0.5×10⁻⁵ M, about 1×10⁻⁶ M, about 0.5×10⁻⁶ M, about 1×10⁷ M, about 0.5×10⁻⁷ M, about 1×10⁻⁸ M, about 0.5×10⁻⁸ M, about 1×10⁻⁹ M, about 0.5×10⁻⁹ M, about 1×10⁻¹⁰ M, about 0.5×10⁻¹⁰ M, or about 1×10⁻¹¹ M (inclusive); about 1×10⁻¹¹ M to about 1×10⁻⁵ M, about 0.5×10⁻⁵ M, about 1×10⁻⁶ M, about 0.5×10⁻⁶ M, about 1×10⁷ M, about 0.5×10⁻⁷ M, about 1×10⁻⁸ M, about 0.5×10⁻⁸ M, about 1×10⁻⁹M, about 0.5×10⁻⁹ M, about 1×10⁻¹⁰M, or about 0.5×10⁻¹⁰ M (inclusive); about 0.5×10⁻¹⁰ M to about 1×10⁻⁵ M, about 0.5×10⁻⁵ M, about 1×10⁻⁶ M, about 0.5×10⁻⁶ M, about 1×10⁻⁷ M, about 0.5×10⁻⁷ M, about 1×10⁻⁸ M, about 0.5×10⁻⁸ M, about 1×10⁻⁹ M, about 0.5×10⁻⁹ M, or about 1×10⁻¹⁰ M (inclusive); about 1×10⁻¹⁰ M to about 1×10⁻⁵ M, about 0.5×10⁻⁵ M, about 1×10⁻⁶ M, about 0.5×10⁻⁶ M, about 1×10⁻⁷ M, about 0.5×10⁻⁷ M, about 1×10⁻⁸ M, about 0.5×10⁻⁸ M, about 1×10−9 M, or about 0.5×10⁻⁹ M (inclusive); about 0.5×10⁻⁹ M to about 1×10⁻⁵ M, about 0.5×10⁻⁵ M, about 1×10⁻⁶ M, about 0.5×10⁻⁶ M, about 1×10⁻⁷ M, about 0.5×10⁻⁷ M, about 1×10⁻⁸ M, about 0.5×10⁻⁸ M, or about 1×10⁻⁹ M (inclusive); about 1×10⁻⁹ M to about 1×10⁻⁵ M, about 0.5×10⁻⁵ M, about 1×10⁻⁶ M, about 0.5×10⁻⁶ M, about 1×10⁻⁷ M, about 0.5×10⁻⁷ M, about 1×10⁻⁸ M, or about 0.5×10⁻⁸ M (inclusive); about 0.5×10⁻⁸ M to about 1×10⁻⁵ M, about 0.5×10⁻⁵ M, about 1×10⁻⁶ M, about 0.5×10⁻⁶ M, about 1×10⁻⁷ M, about 0.5×10⁻⁷ M, or about 1×10⁻⁸ M (inclusive); about 1×10⁻⁸ M to about 1×10⁻⁵ M, about 0.5×10⁻⁵ M, about 1×10⁻⁶ M, about 0.5×10⁻⁶ M, about 1×10⁷ M, or about 0.5×10⁻⁷ M (inclusive); about 0.5×10⁻⁷ M to about 1×10⁻⁵ M, about 0.5×10⁻⁵ M, about 1×10⁻⁶ M, about 0.5×10⁻⁶ M, or about 1×10⁻⁷ M (inclusive); about 1×10⁻⁷ M to about 1×10⁻⁵ M, about 0.5×10⁻⁵ M, about 1×10⁻⁶ M, or about 0.5×10⁻⁶ M (inclusive); about 0.5×10⁻⁶ M to about 1×10⁻⁵ M, about 0.5×10⁻⁵ M, or about 1×10⁻⁶ M (inclusive); about 1×10⁻⁶ M to about 1×10⁻⁵ M or about 0.5×10⁻⁵ M (inclusive); or about 0.5×10⁻⁵ M to about 1×10⁻⁵ M (inclusive), e.g., as measured in phosphate buffered saline using surface plasmon resonance (SPR).

[0723] In some embodiments, any of the antibodies or antigen-binding fragments described herein has a K_{off} of about 1×10⁻⁶ s⁻¹ to about 1×10⁻³ s⁻¹, about 0.5×10⁻³ s⁻¹, about 1×10⁻⁴ s⁻¹, about 0.5×10⁻⁴ s⁻¹, about 1×10⁻⁵ s⁻¹, or about 0.5×10⁻⁵ s⁻¹ (inclusive); about 0.5×10⁻⁵ s⁻¹ to about 1×10⁻³ s⁻¹, about 0.5×10⁻³ s⁻¹, about 1×10⁻⁴ s⁻¹, about 0.5×10⁻⁴ s⁻¹, or about 1×10⁻⁵ s⁻¹ (inclusive); about 1×10⁻⁵ s⁻¹ to about 1×10⁻³ s⁻¹, about 0.5×10⁻³ s⁻¹, about 1×10⁻⁴ s⁻¹, or about 0.5×10⁻⁴ s⁻¹ (inclusive); about 0.5×10⁻⁴ s⁻¹ to about 1×10⁻³ s⁻¹, about 0.5×10⁻³ s⁻¹, or about 1×10⁻⁴ s⁻¹ (inclusive); about 1×10⁻⁴ s⁻¹ to about 1×10⁻³ s⁻¹, or about 0.5×10⁻³ s⁻¹ (inclusive); or about 0.5×10⁻⁵ s⁻¹ to about 1×10⁻³ s⁻¹ (inclusive), e.g., as measured in phosphate buffered saline using surface plasmon resonance (SPR).

[0724] In some embodiments, any of the antibodies or antigen-binding fragments described herein has a Kₒₙ of about 1×10² M⁻¹s⁻¹ to about 1×10⁶ M⁻¹s⁻¹, about 0.5×10⁶ M⁻¹s⁻¹, about 1×10⁵ M⁻¹s⁻¹, about 0.5×10⁵ M⁻¹s⁻¹, about 1×10⁴ M⁻¹s⁻¹, about 0.5×10⁴ M⁻¹s⁻¹, about 1×10³ M⁻¹s⁻¹, or about 0.5×10³ M⁻¹s⁻¹(inclusive); about 0.5×10³ M⁻¹s⁻¹ to about 1×10⁶ M⁻¹s⁻¹, about 0.5×10⁶ M⁻¹s⁻¹, about 1×10⁵ M⁻¹s⁻¹, about 0.5×10⁵ M⁻¹s⁻¹, about 1×10⁴ M⁻¹s⁻¹, about 0.5×10⁴ M⁻¹s⁻¹, or about 1×10³ M⁻¹s⁻¹ (inclusive); about 1×10³ M⁻¹s⁻¹ to about 1×10⁶M⁻¹s⁻¹, about 0.5×10⁶ M⁻¹s⁻¹, about 1×10⁵ M⁻¹s⁻¹, about 0.5×10⁵ M⁻¹s⁻¹, about 1×10⁴ M⁻¹s⁻¹, or about 0.5×10⁴ M⁻¹s⁻¹ (inclusive); about 0.5×10⁴ M⁻¹s⁻¹ to about 1×10⁶ M⁻¹s⁻¹, about 0.5×10⁶ M⁻¹s⁻¹, about 1×10⁵ M⁻¹s⁻¹, about 0.5×10⁵ M⁻¹s⁻¹, or about 1×10⁴ M⁻¹s⁻¹ (inclusive); about 1×10⁴ M⁻¹s⁻¹ to about 1×10⁶ M⁻¹s⁻¹, about 0.5×10⁶ M⁻¹s⁻¹, about 1×10⁵ M⁻¹s⁻¹, or about 0.5×10⁵ M⁻¹s⁻¹(inclusive); about 0.5×10⁵ M⁻¹s⁻¹ to about 1×10⁶ M⁻¹s⁻¹, about 0.5×10⁶ M⁻¹s⁻¹, or about 1×10⁵ M⁻¹s⁻¹(inclusive); about 1×10⁵ M⁻¹s⁻¹ to about 1×10⁶ M⁻¹s⁻¹, or about 0.5×10⁶ M⁻¹s⁻¹ (inclusive); or about 0.5×10⁶ M⁻¹s⁻¹ to about 1×10⁶ M⁻¹s⁻¹ (inclusive), e.g., as measured in phosphate buffered saline using surface plasmon resonance (SPR).

### Fusion Proteins

[0725] In some embodiments, the IL-13 inhibitor is a fusion protein or a soluble antagonist. In some embodiments, the fusion protein comprises a soluble fragment of a receptor of IL-13 (e.g., a soluble fragment of a complex including IL-13Rα1 and IL-4Ra, a soluble fragment of a complex including IL-13Rα1 and IL-13Rα2, a soluble fragment of IL-13Rα1, a soluble fragment of IL-13Rα2, or soluble fragment of IL-4Rα). In some embodiments, the fusion protein comprises an extracellular domain of a receptor of IL-13 (e.g., a fusion protein including an extracellular domain of both IL-13Rα1 and IL-4Ra, a fusion protein including an extracellular domain of both IL-13Rα1 and IL-13Rα2, a fusion protein including an extracellular domain of IL-13Rα1, a fusion protein including an extracellular domain of IL-13Rα2, or a fusion protein including an extracellular domain of IL-4Rα).

[0726] In some embodiments, the fusion protein comprises or consists of sIL-13Rα2-Fc (see, e.g., Chiaramonte et al., J. Clin. Invest. 104(6):777-785, 1999; Kasaian et al., Am. J. Respir. Cell. Mol. Biol. 36(3):368-376, 2007; Miyahara et al., J. Allergy Clin. Immunol. 118(5):1110-1116, 2006; Rahaman et al., Cancer Res. 62(4):1103-1109, 2002; incorporated by reference herein). In some embodiments, the fusion protein comprises or consists of an IL-13 fusion cytotoxin (e.g., IL-13/diphtheria toxin fusion protein (Li et al., Protein Eng. 15(5):419-427, 2002), IL-13-PE38QQR (IL-13-PE) (Blease et al. (2001) J. Immunol. 167(11):6583-6592, 2001; and Husain et al., J. Neuro-Oncol. 65(1):37-48, 2003)).

### IL-10 Receptor Agonists

[0727] The term “IL-10 receptor agonist” is any molecule that binds to and activates a receptor for IL-10 expressed on a mammalian cell or a nucleic acid that encodes any such molecule. A receptor for IL-10 can include, e.g., a complex of two IL-10 receptor-1 (IL-10R1) proteins and two IL-10 receptor 2 (IL-10R2) proteins. In some examples, an IL-10 receptor agonist is an antibody or an antigen-binding antibody fragment that specifically binds to and activates a receptor for IL-10 (e.g., a human receptor for IL-10). In some examples, an IL-10 receptor agonist is a recombinant IL-10 (e.g., human recombinant IL-10). In some examples, an IL-10 receptor agonist is a pegylated recombinant IL-10 (e.g., pegylated recombinant human IL-10). In some examples, an IL-10 receptor agonist is a fusion protein. In some examples, an IL-10 receptor agonist is an IL-10 peptide mimetic.

[0728] In some embodiments, any of the devices or compositions described herein can contain a recombinant mammalian cell (e.g., a recombinant human cell) that secretes an IL-10 receptor agonist (e.g., a recombinant IL-10, e.g., a recombinant human IL-10). In some embodiments, any of the devices or compositions described herein can contain a mammalian cell (e.g., a human cell) that secretes IL-10 (e.g., human IL-10).

[0729] Activation of an IL-10 receptor in a mammalian cell can be determined by detecting an increase in the activation of downstream signaling proteins in a mammalian cell contacted with an IL-10 receptor agonist. For example, activation of an IL-10 receptor in a mammalian cell can be detected by an increase in the phosphorylation and activity of JAK1 and TYK2, phosphorylation and subsequent nuclear translocation of STAT3, and/or increased transcription of BCLXL, Cyclin-D1, Cyclin-D2, Cyclin-D3, Cyclin-A, Pim1, c-Myc, or p19 (INK4D) (see, e.g., Hu et al., J Leukoc. Biol. 82(2):237-243, 2007; and Cavalcante et al., J. Periodontol. 83(7):926-935, 2012). Reagents for detecting these downstream events that indicate activation of an IL-10 receptor are available from, e.g., ThermoFisher Scientific.

### IL-10 and IL-10 Receptor

[0730] Exemplary sequences of human IL-10 proteins and cDNA sequences are shown below.

| Precursor Human IL-10 Protein (with signal sequence in bold) | |
|---|---|
| (SEQ ID NO: 139) | |
| 1 | mhssallccl vlltgvrasp gqgtqsensc thfpgnlpnm lrdlrdafsr vktffqmkdq |
| 61 | ldnlllkesl ledfkgylgc qalsemiqfy leevmpqaen qdpdikahvn slgenlktlr |
| 121 | lrlrrchrfl pcenkskave qvknafnklq ekgiykamse fdifinyiea ymtmkirn |
| Mature Human IL-10 Protein | |
| (SEQ ID NO: 140) | |
| spgqgtqsensc thfpgnlpnm lrdlrdafsr vktffqmkdq ldnlllkesl | |
| ledfkgylgc qalsemiqfy leevmpqaen qdpdikahvn slgenlktlr | |
| lrlachrfl pcenkskave qvknafnklq ekgiykamse fdifinyiea | |
| ymtmkirn | |
| Human IL-10 cDNA | |
| (SEQ ID NO: 141) | |
| 1 | acacatcagg ggcttgctct tgcaaaacca aaccacaaga cagacttgca aaagaaggca |
| 61 | tgcacagctc agcactgctc tgttgcctgg tcctcctgac tggggtgagg gccagcccag |
| 121 | gccagggcac ccagtctgag aacagctgca cccacttccc aggcaacctg cctaacatgc |
| 181 | ttcgagatct ccgagatgcc ttcagcagag tgaagacttt ctttcaaatg aaggatcagc |
| 241 | tggacaactt gttgttaaag gagtccttgc tggaggactt taagggttac ctgggttgcc |
| 301 | aagccttgtc tgagatgatc cagttttacc tggaggaggt gatgccccaa gctgagaacc |
| 361 | aagacccaga catcaaggcg catgtgaact ccctggggga gaacctgaag accctcaggc |
| 421 | tgaggctacg gcgctgtcat cgatttcttc cctgtgaaaa caagagcaag gccgtggagc |
| 481 | aggtgaagaa tgcctttaat aagctccaag agaaaggcat ctacaaagcc atgagtgagt |
| 541 | ttgacatctt catcaactac atagaagcct acatgacaat gaagatacga aactgagaca |
| 601 | tcagggtggc gactctatag actctaggac ataaattaga ggtctccaaa atcggatctg |
| 661 | gggctctggg atagctgacc cagccccttg agaaacctta ttgtacctct cttatagaat |
| 721 | atttattacc tctgatacct caacccccat ttctatttat ttactgagct tctctgtgaa |
| 781 | cgatttagaa agaagcccaa tattataatt tttttcaata tttattattt tcacctgttt |
| 841 | ttaagctgtt tccatagggt gacacactat ggtatttgag tgttttaaga taaattataa |
| 901 | gttacataag ggaggaaaaa aaatgttctt tggggagcca acagaagctt ccattccaag |
| 961 | cctgaccacg ctttctagct gttgagctgt tttccctgac ctccctctaa tttatcttgt |
| 1021 | ctctgggctt ggggcttcct aactgctaca aatactctta ggaagagaaa ccagggagcc |
| 1081 | cctttgatga ttaattcacc ttccagtgtc tcggagggat tcccctaacc tcattcccca |
| 1141 | accacttcat tcttgaaagc tgtggccagc ttgttattta taacaaccta aatttggttc |
| 1201 | taggccgggc gcggtggctc acgcctgtaa tcccagcact ttgggaggct gaggcgggtg |
| 1261 | gatcacttga ggtcaggagt tcctaaccag cctggtcaac atggtgaaac cccgtctcta |
| 1321 | ctaaaaatac aaaaattagc cgggcatggt ggcgcgcacc tgtaatccca gctacttggg |
| 1381 | aggctgaggc aagagaattg cttgaaccca ggagatggaa gttgcagtga gctgatatca |
| 1441 | tgcccctgta ctccagcctg ggtgacagag caagactctg tctcaaaaaa taaaaataaa |
| 1501 | aataaatttg gttctaatag aactcagttt taactagaat ttattcaatt cctctgggaa |
| 1561 | tgttacattg tttgtctgtc ttcatagcag attttaattt tgaataaata aatgtatctt |
| 1621 | attcacatc |

[0731] The protein and cDNA sequences of exemplary non-human homologues of IL-10 are shown below.

| Precursor Mouse IL-10 Protein (with signal sequence in bold) | |
|---|---|
| (SEQ ID NO: 142) | |
| 1 | mpgsallccl llltgmrisr gqysrednnc thfpvgqshm llelrtafsq vktffqtkdq |
| 61 | ldnilltdsl mqdfkgylgc qalsemiqfy lvevmpqaek hgpeikehln slgeklktlr |
| 121 | mrlrrchrfl pcenkskave qvksdfnklq dqgvykamne fdifinciea ymmikmks |
| Mouse IL-10 cDNA | |
| (SEQ ID NO: 143) | |
| 1 | acatttagag acttgctctt gcactaccaa agccacaagg cagccttgca gaaaagagag |
| 61 | ctccatcatg cctggctcag cactgctatg ctgcctgctc ttactgactg gcatgaggat |
| 121 | cagcaggggc cagtacagcc gggaagacaa taactgcacc cacttcccag tcggccagag |
| 181 | ccacatgctc ctagagctgc ggactgcctt cagccaggtg aagactttct ttcaaacaaa |
| 241 | ggaccagctg gacaacatac tgctaaccga ctccttaatg caggacttta agggttactt |
| 301 | gggttgccaa gccttatcgg aaatgatcca gttttacctg gtagaagtga tgccccaggc |
| 361 | agagaagcat ggcccagaaa tcaaggagca tttgaattcc ctgggtgaga agctgaagac |
| 421 | cctcaggatg cggctgaggc gctgtcatcg atttctcccc tgtgaaaata agagcaaggc |
| 481 | agtggagcag gtgaagagtg attttaataa gctccaagac caaggtgtct acaaggccat |
| 541 | gaatgaattt gacatcttca tcaactgcat agaagcatac atgatgatca aaatgaaaag |
| 601 | ctaaaacacc tgcagtgtgt attgagtctg ctggactcca ggacctagac agagctctct |
| 661 | aaatctgatc cagggatctt agctaacgga aacaactcct tggaaaacct cgtttgtacc |
| 721 | tctctccgaa atatttatta cctctgatac ctcagttccc attctattta ttcactgagc |
| 781 | ttctctgtga actatttaga aagaagccca atattataat tttacagtat ttattatttt |
| 841 | taacctgtgt ttaagctgtt tccattgggg acactttata gtatttaaag ggagattata |
| 901 | ttatatgatg ggaggggttc ttccttggga agcaattgaa gcttctattc taaggctggc |
| 961 | cacacttgag agctgcaggg ccctttgcta tggtgtcctt tcaattgctc tcatccctga |
| 1021 | gttcagagct cctaagagag ttgtgaagaa actcatgggt cttgggaaga gaaaccaggg |
| 1081 | agatcctttg atgatcattc ctgcagcagc tcagagggtt cccctactgt catcccccag |
| 1141 | ccgcttcatc cctgaaaact gtggccagtt tgttatttat aaccacctaa aattagttct |
| 1201 | aatagaactc atttttaact agaagtaatg caattcctct gggaatggtg tattgtttgt |
| 1261 | ctgcctttgt agcagactct aattttgaat aaatggatct tattcg |
| Precursor Rat IL-10 Protein (with signal sequence in bold) | |
| (SEQ ID NO: 144) | |
| 1 | mpgsallccl lllagvktsk ghsirgdnnc thfpvsqthm lrelraafsq vktffqkkdq |
| 61 | ldnilltdsl lqdfkgylgc qalsemikfy lvevmpqaen hgpeikehln slgeklktlw |
| 121 | iqlrrchrfl pcenkskave qvkndfnklq dkgvykamne fdifinciea yvtlkmkn |
| Rat IL-10 cDNA | |
| (SEQ ID NO: 145) | |
| 1 | catgcctggc tcagcactgc tatgttgcct gctcttactg gctggagtga agaccagcaa |
| 61 | aggccattcc atccggggtg acaataactg cacccacttc ccagtcagcc agacccacat |
| 121 | gctccgagag ctgagggctg ccttcagtca agtgaagact ttctttcaaa agaaggacca |
| 181 | gctggacaac atactgctga cagattcctt actgcaggac tttaagggtt acttgggttg |
| 241 | ccaagccttg tcagaaatga tcaagtttta cctggtagaa gtgatgcccc aggcagagaa |
| 301 | ccatggccca gaaatcaagg agcatttgaa ttccctggga gagaagctga agaccctctg |
| 361 | gatacagctg cgacgctgtc atcgatttct cccctgtgag aataaaagca aggcagtgga |
| 421 | gcaggtgaag aatgatttta ataagctcca agacaaaggt gtctacaagg ccatgaatga |
| 481 | gtttgacatc ttcatcaact gcatagaagc ctacgtgaca ctcaaaatga aaaattgaac |
| 541 | cacccggcat ctactggact gcaggacata aatagagctt ctaaatctga tccagagatc |
| 601 | ttagctaacg ggagcaactc cttggaaaac ctcgtttgta cctctctcca aaatatttat |
| 661 | tacctctgat acctcagttc cc |
| Precursor Rabbit IL-10 Protein | |
| (SEQ ID NO: 146) | |
| 1 | mlssallccl vflggtgasr gqdtpaensc ihfpgglphm lrelraafgr vktffqskdq |
| 61 | lnsmlltesl ledlkgylgc qalsemiqfy lkdvmpqaen hspairehvn slgenlktlr |
| 121 | lrlrqchrfl pcenkskave qvksafsklq eegvykamse fdifinyiet ymtmkiks |
| Rabbit IL-10 cDNA | |
| (SEQ ID NO: 147) | |
| 1 | aaagcaaacc acaaggcgga ctcgtagaag caggcagagt tccaccatgc tcagctcagc |
| 61 | tctgctatgt tgcctggtct tcctgggtgg gacaggggcc agccgaggcc aggacacccc |
| 121 | tgctgagaac agctgcattc actttccagg cggcctgccc cacatgctcc gcgagctccg |
| 181 | tgctgccttt ggcagggtga agactttctt tcaatcgaag gatcagctga acagcatgtt |
| 241 | gttaaccgag tccctgctgg aggaccttaa gggttacctg ggatgccaag ccttgtcgga |
| 301 | gatgatccag ttttacctga aggacgtgat gccgcaagct gagaaccaca gtccagccat |
| 361 | cagggagcac gtgaactccc tgggggaaaa cctgaagacc ctcaggctga ggctgcgaca |
| 421 | atgtcaccga tttctcccct gtgaaaacaa gagcaaggca gtggagcagg tgaagagcgc |
| 481 | cttcagcaag ctgcaagagg aaggcgtcta caaagccatg agtgagtttg acatcttcat |
| 541 | caactacata gaaacctaca tgacaatgaa gataaaaagc taaaagcccc aggatggcaa |
| 601 | ctcggctaga gtctaggaca tcagttaggg acctgcacac cctgggtcag ctgacccagc |
| 661 | accttggaaa gctgttgtac ctctcaatat ttattacctc tgatacctca gctcccgatc |
| 721 | ctatttattt accgagcttc tctgtgaact ctttagaaag aagcccacta ttataatttt |
| 781 | ttcagtattt attattttca cctgcattta agctgtaccc atggggtgat gccctgtggg |
| 841 | atttgagtgt cttaggagaa attataattt atgtgaaagg gaaaatgtgc cttggggagc |
| 901 | cgactgaggc ttccattcct tctgtgcctg accacacttt ctaactccta agccgagctc |
| 961 | cctcttaccc tctggagccc ggacctgggt ctcgagtgtt ccagagactc ctagcctctt |
| 1021 | aggaagagag accggaagcc cttgggtggt gaccttccgg cagctcagag ggaggctcct |
| 1081 | gacctcgat |
| Precursor Monkey IL-10 Protein (with signal sequence in bold) | |
| (SEQ ID NO: 148) | |
| 1 | mhssallccl vlltgvrasp gqgtqsensc trfpgnlphm lrdlrdafsr vktffqmkdq |
| 61 | ldnillkesl ledfkgylgc qalsemiqfy leevmpqaen hdpdikehvn slgenlktlr |
| 121 | lrlrrchrfl pcenkskave qvknafsklq ekgvykamse fdifinyiea ymtmkiqn |
| Monkey IL-10 cDNA | |
| (SEQ ID NO: 149) | |
| 1 | agaaggcatg cacagctcag cactgctctg ttgcctagtc ctcctgactg gggtgagggc |
| 61 | cagcccaggc cagggcaccc agtctgagaa cagctgcacc cgcttcccag gcaacctgcc |
| 121 | tcacatgctt cgagacctcc gagatgcctt cagcagagtg aagactttct ttcaaatgaa |
| 181 | ggatcagctg gacaacatat tgttaaagga gtccttgctg gaggacttta agggttacct |
| 241 | gggttgccaa gccttgtctg agatgatcca gttttacctg gaggaggtga tgccccaagc |
| 301 | tgagaaccac gacccagaca tcaaggagca tgtgaactcc ctgggggaga atctgaagac |
| 361 | cctcaggctg aggctgcggc gctgtcatcg atttcttccc tgtgaaaaca agagcaaggc |
| 421 | cgtggagcag gtgaagaatg cctttagtaa gctccaagag aaaggcgtct acaaagccat |
| 481 | gagtgagtd gacatcttca tcaactacat agaagcctac atgacaatga agatacaaaa |
| 541 | ctgagacatc agggtggcga ctctatagac tctaggacat aaattagagg tctccaaaat |
| 601 | cagatccagg gttctgggat agctgaccca gccccttgag aaa |

[0732] Exemplary protein and cDNA sequences for human IL-10R-1 and human IL-10R-2 are shown below.

| Precursor Human IL-10R-1 Protein (with signal sequence in bold) | |
|---|---|
| (SEQ ID NO: 150) | |
| 1 | mlpclvvlla allslrlgsd ahgtelpspp svwfeaeffh hilhwtpipn qsestcyeva |
| 61 | llrygieswn sisncsqtls ydltavtldl yhsngyrarv ravdgsrhsn wtvtntrfsv |
| 121 | devtltvgsv nleihngfil gkiqlprpkm apandtyesi fshfreyeia irkvpgnftf |
| 181 | thkkvkhenf slltsgevge fcvqvkpsva srsnkgmwsk eecisltrqy ftvtnviiff |
| 241 | afvlllsgal ayclalqlyv rrrkklpsvl lfkkpspfif isqrpspetq dtihpldeea |
| 301 | flkvspelkn ldlhgstdsg fgstkpslqt eepqfllpdp hpqadrtlgn reppvlgdsc |
| 361 | ssgssnstds giclqepsls pstgptweqq vgsnsrgqdd sgidlvqnse gragdtqggs |
| 421 | alghhsppep evpgeedpaa vafqgylrqt rcaeekatkt gcleeesplt dglgpkfgrc |
| 481 | lvdeaglhpp alakgylkqd plemtlassg aptgqwnqpt eewsllalss csdlgisdws |
| 541 | fahdlaplgc vaapggllgs fnsdlvtlpl isslqsse |
| Human IL-10R-1 cDNA, transcript variant 1 | |
| (SEQ ID NO: 151) | |
| 1 | gtcagtccca gcccaagggt agctggaggc gcgcaggccg gctccgctcc ggccccggac |
| 61 | gatgcggcgc gcccaggatg ctgccgtgcc tcgtagtgct gctggcggcg ctcctcagcc |
| 121 | tccgtcttgg ctcagacgct catgggacag agctgcccag ccctccgtct gtgtggtttg |
| 181 | aagcagaatt tttccaccac atcctccact ggacacccat cccaaatcag tctgaaagta |
| 241 | cctgctatga agtggcgctc ctgaggtatg gaatagagtc ctggaactcc atctccaact |
| 301 | gtagccagac cctgtcctat gaccttaccg cagtgacctt ggacctgtac cacagcaatg |
| 361 | gctaccgggc cagagtgcgg gctgtggacg gcagccggca ctccaactgg accgtcacca |
| 421 | acacccgctt ctctgtggat gaagtgactc tgacagttgg cagtgtgaac ctagagatcc |
| 481 | acaatggctt catcctcggg aagattcagc tacccaggcc caagatggcc cccgcaaatg |
| 541 | acacatatga aagcatcttc agtcacttcc gagagtatga gattgccatt cgcaaggtgc |
| 601 | cgggaaactt cacgttcaca cacaagaaag taaaacatga aaacttcagc ctcctaacct |
| 661 | ctggagaagt gggagagttc tgtgtccagg tgaaaccatc tgtcgcttcc cgaagtaaca |
| 721 | aggggatgtg gtctaaagag gagtgcatct ccctcaccag gcagtatttc accgtgacca |
| 781 | acgtcatcat cttctttgcc tttgtcctgc tgctctccgg agccctcgcc tactgcctgg |
| 841 | ccctccagct gtatgtgcgg cgccgaaaga agctacccag tgtcctgctc ttcaagaagc |
| 901 | ccagcccctt catcttcatc agccagcgtc cctccccaga gacccaagac accatccacc |
| 961 | cgcttgatga ggaggccttt ttgaaggtgt ccccagagct gaagaacttg gacctgcacg |
| 1021 | gcagcacaga cagtggcttt ggcagcacca agccatccct gcagactgaa gagccccagt |
| 1081 | tcctcctccc tgaccctcac ccccaggctg acagaacgct gggaaacagg gagccccctg |
| 1141 | tgctggggga cagctgcagt agtggcagca gcaatagcac agacagcggg atctgcctgc |
| 1201 | aggagcccag cctgagcccc agcacagggc ccacctggga gcaacaggtg gggagcaaca |
| 1261 | gcaggggcca ggatgacagt ggcattgact tagttcaaaa ctctgagggc cgggctgggg |
| 1321 | acacacaggg tggctcggcc ttgggccacc acagtccccc ggagcctgag gtgcctgggg |
| 1381 | aagaagaccc agctgctgtg gcattccagg gttacctgag gcagaccaga tgtgctgaag |
| 1441 | agaaggcaac caagacaggc tgcctggagg aagaatcgcc cttgacagat ggccttggcc |
| 1501 | ccaaattcgg gagatgcctg gttgatgagg caggcttgca tccaccagcc ctggccaagg |
| 1561 | gctatttgaa acaggatcct ctagaaatga ctctggcttc ctcaggggcc ccaacgggac |
| 1621 | agtggaacca gcccactgag gaatggtcac tcctggcctt gagcagctgc agtgacctgg |
| 1681 | gaatatctga ctggagcttt gcccatgacc ttgcccctct aggctgtgtg gcagccccag |
| 1741 | gtggtctcct gggcagcttt aactcagacc tggtcaccct gcccctcatc tctagcctgc |
| 1801 | agtcaagtga gtgactcggg ctgagaggct gcttttgatt ttagccatgc ctgctcctct |
| 1861 | gcctggacca ggaggagggc ccctggggca gaagttaggc acgaggcagt ctgggcactt |
| 1921 | ttctgcaagt ccactggggc tggccccagc caggccctgc agggctggtc agggtgtctg |
| 1981 | gggcaggagg aggccaactc actgaactag tgcagggtat gtgggtggca ctgacctgtt |
| 2041 | ctgttgactg gggccctgca gactctggca gagctgagaa gggcagggac cttctccctc |
| 2101 | ctaggaactc tttcctgtat cataaaggat tatttgctca ggggaaccat ggggctttct |
| 2161 | ggagttgtgg tgaggccacc aggctgaagt cagctcagac ccagacctcc ctgcttaggc |
| 2221 | cactcgagca tcagagcttc cagcaggagg aagggctgta ggaatggaag cttcagggcc |
| 2281 | ttgctgctgg ggtcattttt aggggaaaaa ggaggatatg atggtcacat ggggaacctc |
| 2341 | ccctcatcgg gcctctgggg caggaagctt gtcactggaa gatcttaagg tatatatttt |
| 2401 | ctggacactc aaacacatca taatggattc actgagggga gacaaaggga gccgagaccc |
| 2461 | tggatggggc ttccagctca gaacccatcc ctctggtggg tacctctggc acccatctgc |
| 2521 | aaatatctcc ctctctccaa caaatggagt agcatccccc tggggcactt gctgaggcca |
| 2581 | agccactcac atcctcactt tgctgcccca ccatcttgct gacaacttcc agagaagcca |
| 2641 | tggttttttg tattggtcat aactcagccc tttgggcggc ctctgggctt gggcaccagc |
| 2701 | tcatgccagc cccagagggt cagggttgga ggcctgtgct tgtgtttgct gctaatgtcc |
| 2761 | agctacagac ccagaggata agccactggg cactgggctg gggtccctgc cttgttggtg |
| 2821 | ttcagctgtg tgattttgga ctagccactt gtcagagggc ctcaatctcc catctgtgaa |
| 2881 | ataaggactc cacctttagg ggaccctcca tgtttgctgg gtattagcca agctggtcct |
| 2941 | gggagaatgc agatactgtc cgtggactac caagctggct tgtttcttat gccagaggct |
| 3001 | aacagatcca atgggagtcc atggtgtcat gccaagacag tatcagacac agccccagaa |
| 3061 | gggggcatta tgggccctgc ctccccatag gccatttgga ctctgccttc aaacaaaggc |
| 3121 | agttcagtcc acaggcatgg aagctgtgag gggacaggcc tgtgcgtgcc atccagagtc |
| 3181 | atctcagccc tgcctttctc tggagcattc tgaaaacaga tattctggcc cagggaatcc |
| 3241 | agccatgacc cccacccctc tgccaaagta ctcttaggtg ccagtctggt aactgaactc |
| 3301 | cctctggagg caggcttgag ggaggattcc tcagggttcc cttgaaagct ttatttattt |
| 3361 | attttgttca tttatttatt ggagaggcag cattgcacag tgaaagaatt ctggatatct |
| 3421 | caggagcccc gaaattctag ctctgacttt gctgtttcca gtggtatgac cttggagaag |
| 3481 | tcacttatcc tcttggagcc tcagtttcct catctgcaga ataatgactg acttgtctaa |
| 3541 | ttcgtaggga tgtgaggttc tgctgaggaa atgggtatga atgtgccttg aacacaaagc |
| 3601 | tctgtcaata agtgatacat gttttttatt ccaataaatt gtcaagacca caggaaaaaa |
| 3661 | aaaaaaaaaa aa |
| Human IL-10R-1 cDNA, transcript variant 2 | |
| (SEQ ID NO: 152) | |
| 1 | gtcagtccca gcccaagggt agctggaggc gcgcaggccg gctccgctcc ggccccggac |
| 61 | gatgcggcgc gcccaggatg ctgccgtgcc tcgtagtgct gctggcggcg ctcctcagcc |
| 121 | tccgtcttgg ctcagacgct catggctcac ctgttgtgga agtggaagag gctgaaattg |
| 181 | acaggaactg acggattggg aaggatagag aagtatgcgc aaggccaaac ccccaacccg |
| 241 | caaacctcat catccaccca cttctagatg agccggacag agctgcccag ccctccgtct |
| 301 | gtgtggtttg aagcagaatt tttccaccac atcctccact ggacacccat cccaaatcag |
| 361 | tctgaaagta cctgctatga agtggcgctc ctgaggtatg gaatagagtc ctggaactcc |
| 421 | atctccaact gtagccagac cctgtcctat gaccttaccg cagtgacctt ggacctgtac |
| 481 | cacagcaatg gctaccgggc cagagtgcgg gctgtggacg gcagccggca ctccaactgg |
| 541 | accgtcacca acacccgctt ctctgtggat gaagtgactc tgacagttgg cagtgtgaac |
| 601 | ctagagatcc acaatggctt catcctcggg aagattcagc tacccaggcc caagatggcc |
| 661 | cccgcaaatg acacatatga aagcatcttc agtcacttcc gagagtatga gattgccatt |
| 721 | cgcaaggtgc cgggaaactt cacgttcaca cacaagaaag taaaacatga aaacttcagc |
| 781 | ctcctaacct ctggagaagt gggagagttc tgtgtccagg tgaaaccatc tgtcgcttcc |
| 841 | cgaagtaaca aggggatgtg gtctaaagag gagtgcatct ccctcaccag gcagtatttc |
| 901 | accgtgacca acgtcatcat cttctttgcc tttgtcctgc tgctctccgg agccctcgcc |
| 961 | tactgcctgg ccctccagct gtatgtgcgg cgccgaaaga agctacccag tgtcctgctc |
| 1021 | ttcaagaagc ccagcccctt catcttcatc agccagcgtc cctccccaga gacccaagac |
| 1081 | accatccacc cgcttgatga ggaggccttt ttgaaggtgt ccccagagct gaagaacttg |
| 1141 | gacctgcacg gcagcacaga cagtggcttt ggcagcacca agccatccct gcagactgaa |
| 1201 | gagccccagt tcctcctccc tgaccctcac ccccaggctg acagaacgct gggaaacagg |
| 1261 | gagccccctg tgctggggga cagctgcagt agtggcagca gcaatagcac agacagcggg |
| 1321 | atctgcctgc aggagcccag cctgagcccc agcacagggc ccacctggga gcaacaggtg |
| 1381 | gggagcaaca gcaggggcca ggatgacagt ggcattgact tagttcaaaa ctctgagggc |
| 1441 | cgggctgggg acacacaggg tggctcggcc ttgggccacc acagtccccc ggagcctgag |
| 1501 | gtgcctgggg aagaagaccc agctgctgtg gcattccagg gttacctgag gcagaccaga |
| 1561 | tgtgctgaag agaaggcaac caagacaggc tgcctggagg aagaatcgcc cttgacagat |
| 1621 | ggccttggcc ccaaattcgg gagatgcctg gttgatgagg caggcttgca tccaccagcc |
| 1681 | ctggccaagg gctatttgaa acaggatcct ctagaaatga ctctggcttc ctcaggggcc |
| 1741 | ccaacgggac agtggaacca gcccactgag gaatggtcac tcctggcctt gagcagctgc |
| 1801 | agtgacctgg gaatatctga ctggagcttt gcccatgacc ttgcccctct aggctgtgtg |
| 1861 | gcagccccag gtggtctcct gggcagcttt aactcagacc tggtcaccct gcccctcatc |
| 1921 | tctagcctgc agtcaagtga gtgactcggg ctgagaggct gcttttgatt ttagccatgc |
| 1981 | ctgctcctct gcctggacca ggaggagggc ccctggggca gaagttaggc acgaggcagt |
| 2041 | ctgggcactt ttctgcaagt ccactggggc tggccccagc caggccctgc agggctggtc |
| 2101 | agggtgtctg gggcaggagg aggccaactc actgaactag tgcagggtat gtgggtggca |
| 2161 | ctgacctgtt ctgttgactg gggccctgca gactctggca gagctgagaa gggcagggac |
| 2221 | cttctccctc ctaggaactc tttcctgtat cataaaggat tatttgctca ggggaaccat |
| 2281 | ggggctttct ggagttgtgg tgaggccacc aggctgaagt cagctcagac ccagacctcc |
| 2341 | ctgcttaggc cactcgagca tcagagcttc cagcaggagg aagggctgta ggaatggaag |
| 2401 | cttcagggcc ttgctgctgg ggtcattttt aggggaaaaa ggaggatatg atggtcacat |
| 2461 | ggggaacctc ccctcatcgg gcctctgggg caggaagctt gtcactggaa gatcttaagg |
| 2521 | tatatatttt ctggacactc aaacacatca taatggattc actgagggga gacaaaggga |
| 2581 | gccgagaccc tggatggggc ttccagctca gaacccatcc ctctggtggg tacctctggc |
| 2641 | acccatctgc aaatatctcc ctctctccaa caaatggagt agcatccccc tggggcactt |
| 2701 | gctgaggcca agccactcac atcctcactt tgctgcccca ccatcttgct gacaacttcc |
| 2761 | agagaagcca tggttttttg tattggtcat aactcagccc tttgggcggc ctctgggctt |
| 2821 | gggcaccagc tcatgccagc cccagagggt cagggttgga ggcctgtgct tgtgtttgct |
| 2881 | gctaatgtcc agctacagac ccagaggata agccactggg cactgggctg gggtccctgc |
| 2941 | cttgttggtg ttcagctgtg tgattttgga ctagccactt gtcagagggc ctcaatctcc |
| 3001 | catctgtgaa ataaggactc cacctttagg ggaccctcca tgtttgctgg gtattagcca |
| 3061 | agctggtcct gggagaatgc agatactgtc cgtggactac caagctggct tgtttcttat |
| 3121 | gccagaggct aacagatcca atgggagtcc atggtgtcat gccaagacag tatcagacac |
| 3181 | agccccagaa gggggcatta tgggccctgc ctccccatag gccatttgga ctctgccttc |
| 3241 | aaacaaaggc agttcagtcc acaggcatgg aagctgtgag gggacaggcc tgtgcgtgcc |
| 3301 | atccagagtc atctcagccc tgcctttctc tggagcattc tgaaaacaga tattctggcc |
| 3361 | cagggaatcc agccatgacc cccacccctc tgccaaagta ctcttaggtg ccagtctggt |
| 3421 | aactgaactc cctctggagg caggcttgag ggaggattcc tcagggttcc cttgaaagct |
| 3481 | ttatttattt attttgttca tttatttatt ggagaggcag cattgcacag tgaaagaatt |
| 3541 | ctggatatct caggagcccc gaaattctag ctctgacttt gctgtttcca gtggtatgac |
| 3601 | cttggagaag tcacttatcc tcttggagcc tcagtttcct catctgcaga ataatgactg |
| 3661 | acttgtctaa ttcgtaggga tgtgaggttc tgctgaggaa atgggtatga atgtgccttg |
| 3721 | aacacaaagc tctgtcaata agtgatacat gttttttatt ccaataaatt gtcaagacca |
| 3781 | caggaaaaaa aaaaaaaaaa aa |
| Precursor Human IL-10R-2 Protein (with signal sequence in bold) | |
| (SEQ ID NO: 153) | |
| 1 | mawslgswlg gcllvsalgm vpppenvrmn svnfknilqw espafakgnl tftaqylsyr |
| 61 | ifqdkcmntt ltecdfssls kygdhtlrvr aefadehsdw vnitfcpvdd tiigppgmqv |
| 121 | evladslhmr flapkieney etwtmknvyn swtynvqywk ngtdekfqit pqydfevlrn |
| 181 | lepwttycvq vrgflpdrnk agewsepvce qtthdetvps wmvavilmas vfmvclallg |
| 241 | cfallwcvyk ktkyafsprn slpqhlkefl ghphhntllf fsfplsdend vfdklsviae |
| 301 | dsesgkqnpg dscslgtppg qgpqs |
| Human IL-10R-2 cDNA | |
| (SEQ ID NO: 154) | |
| 1 | cccgcccatc tccgctggtt cccggaagcc gccgcggaca agctctcccg ggcgcgggcg |
| 61 | ggggtcgtgt gcttggagga agccgcggaa cccccagcgt ccgtccatgg cgtggagcct |
| 121 | tgggagctgg ctgggtggct gcctgctggt gtcagcattg ggaatggtac cacctcccga |
| 181 | aaatgtcaga atgaattctg ttaatttcaa gaacattcta cagtgggagt cacctgcttt |
| 241 | tgccaaaggg aacctgactt tcacagctca gtacctaagt tataggatat tccaagataa |
| 301 | atgcatgaat actaccttga cggaatgtga tttctcaagt ctttccaagt atggtgacca |
| 361 | caccttgaga gtcagggctg aatttgcaga tgagcattca gactgggtaa acatcacctt |
| 421 | ctgtcctgtg gatgacacca ttattggacc ccctggaatg caagtagaag tacttgctga |
| 481 | ttctttacat atgcgtttct tagcccctaa aattgagaat gaatacgaaa cttggactat |
| 541 | gaagaatgtg tataactcat ggacttataa tgtgcaatac tggaaaaacg gtactgatga |
| 601 | aaagtttcaa attactcccc agtatgactt tgaggtcctc agaaacctgg agccatggac |
| 661 | aacttattgt gttcaagttc gagggtttct tcctgatcgg aacaaagctg gggaatggag |
| 721 | tgagcctgtc tgtgagcaaa caacccatga cgaaacggtc ccctcctgga tggtggccgt |
| 781 | catcctcatg gcctcggtct tcatggtctg cctggcactc ctcggctgct tcgccttgct |
| 841 | gtggtgcgtt tacaagaaga caaagtacgc cttctcccct aggaattctc ttccacagca |
| 901 | cctgaaagag tttttgggcc atcctcatca taacacactt ctgtttttct cctttccatt |
| 961 | gtcggatgag aatgatgttt ttgacaagct aagtgtcatt gcagaagact ctgagagcgg |
| 1021 | caagcagaat cctggtgaca gctgcagcct cgggaccccg cctgggcagg ggccccaaag |
| 1081 | ctaggctctg agaaggaaac acactcggct gggcacagtg acgtactcca tctcacatct |
| 1141 | gcctcagtga gggatcaggg cagcaaacaa gggccaagac catctgagcc agccccacat |
| 1201 | ctagaactcc cagaccctgg acttagccac cagagagcta cattttaaag gctgtcttgg |
| 1261 | caaaaatact ccatttggga actcactgcc ttataaaggc tttcatgatg ttttcagaag |
| 1321 | ttggccactg agagtgtaat tttcagcctt ttatatcact aaaataagat catgttttaa |
| 1381 | ttgtgagaaa cagggccgag cacagtggct cacgcctgta ataccagcac cttagaggtc |
| 1441 | gaggcaggcg gatcacttga ggtcaggagt tcaagaccag cctggccaat atggtgaaac |
| 1501 | ccagtctcta ctaaaaatac aaaaattagc taggcatgat ggcgcatgcc tataatccca |
| 1561 | gctactcgag tgcctgaggc aggagaattg catgaacccg ggaggaggag gaggaggttg |
| 1621 | cagtgagccg agatagcggc actgcactcc agcctgggtg acaaagtgag actccatctc |
| 1681 | aaaaaaaaaa aaaaaaaaaa ttgtgagaaa cagaaatact taaaatgagg aataagaatg |
| 1741 | gagatgttac atctggtaga tgtaacattc taccagatta tggatggact gatctgaaaa |
| 1801 | tcgacctcaa ctcaagggtg gtcagctcaa tgctacacag agcacggact tttggattct |
| 1861 | ttgcagtact ttgaatttat ttttctacct atatatgttt tatatgctgc tggtgctcca |
| 1921 | ttaaagtttt actctgtgtt gcactatatg tgttcatgat aaaaaa |

### Recombinant IL-10

[0733] In some examples, an IL-10 receptor agonist is a recombinant IL-10 protein. In some examples, a recombinant IL-10 protein has an amino acid sequence that is identical to a human IL-10 protein (e.g., SEQ ID NO: 140). Non-limiting commercial sources of recombinant human IL-10 protein are available from Peprotech (Rocky Hill, N.J.), Novus Biologicals (Littleton, Colo.), Stemcell™ Technologies (Cambridge, Mass.), Millipore Sigma (Billerica, Mass.), and R&D Systems (Minneapolis, Minn.). In some examples, a recombinant human IL-10 protein can be Tenovil™ (Schering Corporation).

[0734] In some examples, a recombinant IL-10 protein is a functional fragment of human IL-10 protein (e.g., SEQ ID NO: 140). In some examples, a functional fragment of human IL-10 is a fragment of a human IL-10 protein (e.g., SEQ ID NO: 140) that is able to specifically bind to and activate a human receptor of IL-10. For example, a functional fragment of human IL-10 protein can have one, two, three, four, five, six, seven, eight, nine, ten, eleven, twelve, thirteen, fourteen, fifteen, sixteen, seventeen, eighteen, nineteen, or twenty amino acids from the N- and/or C-terminus of SEQ ID NO: 140.

[0735] In some examples, a recombinant human IL-10 includes a sequence at least 80% identical (e.g., at least 82% identical, at least 84% identical, at least 86% identical, at least 88% identical, at least 90% identical, at least 92% identical, at least 94% identical, at least 95% identical, at least 96% identical, at least 98% identical, or at least 99% identical) to SEQ ID NO: 140, and is able to specifically bind to and activate a human receptor of IL-10. Mutation of amino acids that are not conserved between different mammalian species less likely to have a negative effect on the activity of a recombinant IL-10 protein.

[0736] In some embodiments, the IL-10 receptor agonist is rhuIL-10 (Tenovil) or a variant thereof. See, e.g., McHutchison et al., J Interferon Cytokine Res. 1:1265-1270, 1999; Rosenblum et al., Regul. Toxicol. Pharmacol. 35:56-71, 2002; Schreiber et al., Gastroenterology 119(6):1461-1472, 2000; Maini et al., Arthritis Rheum. 40(Suppl):224, 1997.

[0737] Exemplary methods of making a recombinant human IL-10 are described in Pajkrt et al., J. Immunol. 158: 3971-3977, 1997). Additional exemplary methods of making recombinant IL-10 are described herein and are known in the art.

[0738] In some embodiments, a recombinant IL-10 is a pegylated recombinant IL-10 (e.g., pegylated recombinant human IL-10) (e.g., a 5 kDa N-terminally PEGylated form of IL-10; AM0010) (Infante et al., ASCO Meeting Abstracts 33(15_suppl):3017, 2015; Chan et al., PLoS One 11(6):e0156229, 2016; Mumm et al., Cancer Cell 20(6):781-796, 2011; Teng et al., Cancer Cell 20(6):691-693, 2011; U.S. Pat. Nos. 8,691,205; 8,865,652; 9,259,478; and 9,364,517; and U.S. Patent Application Publication Nos. 2008/0081031; 2009/0214471; 2011/0250163; 2011/0091419; 2014/0227223; 2015/0079031; 2015/0086505; 2016/0193352; 2016/0367689; 2016/0375101; and 2016/0166647).

[0739] In some embodiments, a recombinant IL-10 is a stabilized isoform of a recombinant IL-10. In some embodiments, the stabilized isoform of a recombinant IL-10 is a viral IL-10 protein (e.g., a human cytomegalovirus IL10 (e.g., cmv-IL10, LA-cmv-IL-10 (e.g., Lin et al., Virus Res. 131(2):213-223, 2008; Jenkins et al., J. Virol. 78(3):1440-1447, 2004; Kotenko et al., Proc. Natl. Acad. Sci. U.S.A. 97(4):1695-1700, 2000; Jones et al., Proc. Natl. Acad. Sci. U.S.A. 99(14):9404-9409, 2002) or a latency-associated viral IL-10 protein (e.g., Poole et al., J. Virol. 88(24):13947-13955, 2014).

[0740] In some embodiments, the recombinant IL-10 is a mammalian IL-10 homolog (see, e.g., WO 00/073457). In some embodiments, a mammalian IL-10 homolog is BCRF1, an EBV homolog of human IL-10, also known as viral IL-10, or a variant thereof (Liu et al., J. Immunol. 158(2):604-613, 1997).

### Fusion Proteins

[0741] In some embodiments, the IL-10 receptor agonist is a fusion protein. In some embodiments, the fusion protein comprises the amino acid sequence of an IL-10 protein (or a functional fragment thereof) and a fusion partner (e.g., an Fc region (e.g., human IgG Fc) or human serum albumin). In some embodiments the fusion partner can be an antibody or an antigen-binding antibody fragment (e.g., an scFv) that targets IL-10 receptor agonist to an inflamed tissue. In some embodiments, the antibody or antigen-binding fragment that is a fusion partner can bind specifically, or preferentially, to inflamed gastrointestinal cells by, e.g., CD69. In some embodiments, an IL-10 receptor agonist that is a fusion protein can be, e.g., F8-IL-10, such as Dekavil (Philogen).

[0742] In some embodiments, the fusion protein is a L19-IL-10 fusion protein, a HyHEL10-IL-10 fusion protein, or a variant thereof. See, e.g., Trachsel et al., Arthritis Res. Ther. 9(1):R9, 2007, and Walmsley et al., Arthritis Rheum. 39: 495-503, 1996.

### IL-10 Peptide Mimetic

[0743] In some embodiments, the IL-10 receptor agonist is an IL-10 peptide mimetic. Anon-limiting example of an IL-10 peptide mimetic is IT 9302 or a variant thereof (Osman et al., Surgery 124(3):584-92, 1998; Lopez et al., Immunobiology 216(10):1117-1126, 2011). Additional examples of IL-10 peptide mimetics are described in DeWitt, Nature Biotech. 17:214, 1999, and Reineke et al., Nature Biotech. 17:271-275, 1999.

### Antibodies and Antigen-Binding Fragments

[0744] In some embodiments, the IL-10 receptor agonist is an antibody or an antigen-binding antibody fragment that binds to and activates an IL-10 receptor (e.g., a human IL-10 receptor). In some embodiments, the antibody or antigen-binding antibody fragment that specifically binds to an epitope on IL-10R-1 protein (e.g., human IL-10R-1 protein). In some embodiments, the antibody or antigen-binding antibody fragment that specifically binds to an epitope on IL-10R-2 protein (e.g., a human IL-10R-2 protein). In some embodiments, the antibody or the antigen-binding antibody fragment that specifically binds to an epitope on IL-10R-1 and IL-10R-2 proteins (e.g., human IL-10R-1 and human IL-10R-2 proteins).

[0745] In some embodiments, the antibody can be a humanized antibody, a chimeric antibody, a multivalent antibody, or a fragment thereof. In some embodiments, an antibody can be a scFv-Fc, a VHH domain, a VNAR domain, a (scFv)₂, a minibody, or a BiTE. In some embodiments, an antibody can be a DVD-Ig, and a dual-affinity re-targeting antibody (DART), a triomab, kih IgG with a common LC, a crossmab, an ortho-Fab IgG, a 2-in-1-IgG, IgG-ScFv, scFv₂-Fc, a bi-nanobody, tanden antibody, a DART-Fc, a scFv-HAS-scFv, DNL-Fab3, DAF (two-in-one or four-in-one), DutaMab, DT-IgG, knobs-in-holes common LC, knobs-in-holes assembly, charge pair antibody, Fab-arm exchange antibody, SEEDbody, Triomab, LUZ-Y, Fcab, kλ-body, orthogonal Fab, DVD-IgG, IgG(H)-scFv, scFv-(H)IgG, IgG(L)-scFv, scFv-(L)-IgG, IgG (L,H)-Fc, IgG(H)-V, V(H)—IgG, IgG(L)-V, V(L)-IgG, KIH IgG-scFab, 2scFv-IgG, IgG-2scFv, scFv4-Ig, Zybody, DVI-IgG, nanobody, nanobody-HSA, a diabody, a TandAb, scDiabody, scDiabody-CH3, Diabody-CH3, Triple Body, miniantibody, minibody, TriBi minibody, scFv-CH3 KIH, Fab-scFv, scFv-CH-CL-scFv, F(ab′)₂-scFV2, scFv-KIH, Fab-scFv-Fc, tetravalent HCAb, scDiabody-Fc, diabody-Fc, tandem scFv-Fc, intrabody, dock and lock bispecific antibody, ImmTAC, HSAbody, scDiabody-HAS, tandem scFv, IgG-IgG, Cov-X-Body, and scFv1-PEG-scFv2.

[0746] Non-limiting examples of an antigen-binding fragment of an antibody include an Fv fragment, a Fab fragment, a F(ab′)₂ fragment, and a Fab′ fragment. Additional examples of an antigen-binding fragment of an antibody is an antigen-binding fragment of an IgG (e.g., an antigen-binding fragment of IgG1, IgG2, IgG3, or IgG4) (e.g., an antigen-binding fragment of a human or humanized IgG, e.g., human or humanized IgG1, IgG2, IgG3, or IgG4); an antigen-binding fragment of an IgA (e.g., an antigen-binding fragment of IgA1 or IgA2) (e.g., an antigen-binding fragment of a human or humanized IgA, e.g., a human or humanized IgA1 or IgA2); an antigen-binding fragment of an IgD (e.g., an antigen-binding fragment of a human or humanized IgD); an antigen-binding fragment of an IgE (e.g., an antigen-binding fragment of a human or humanized IgE); or an antigen-binding fragment of an IgM (e.g., an antigen-binding fragment of a human or humanized IgM).

[0747] In some embodiments, the IL-10 receptor agonist is an antibody (e.g., F8-IL10 (also known as DEKAVIL) or a variant thereof (see, e.g., Schwager et al., Arthritis Res. Ther. 11(5):R142, 2009; Franz et al., Int. J. Cardiol. 195:311-322, 2015; Galeazzi et al., Isr. Med. Assoc. J. 16(10):666, 2014).

[0748] In some embodiments, any of the antibodies or antigen-binding fragments described herein has a dissociation constant (K_{D}) of less than 1×10⁻⁵M (e.g., less than 0.5×10⁻⁵ M, less than 1×10⁻⁶ M, less than 0.5×10⁻⁶ M, less than 1×10⁷ M, less than 0.5×10⁻⁷ M, less than 1×10⁻⁸ M, less than 0.5×10⁻⁸ M, less than 1×10⁻⁹ M, less than 0.5×10⁻⁹ M, less than 1×10⁻¹⁰ M, less than 0.5×10⁻¹⁰ M, less than 1×10⁻¹¹ M, less than 0.5×10⁻¹¹ M, or less than 1×10⁻¹²M), e.g., as measured in phosphate buffered saline using surface plasmon resonance (SPR).

[0749] In some embodiments, any of the antibodies or antigen-binding fragments described herein has a K_{D} of about 1×10⁻¹² M to about 1×10⁻⁵ M, about 0.5×10⁻⁵ M, about 1×10⁻⁶ M, about 0.5×10⁻⁶ M, about 1×10⁻⁷ M, about 0.5×10⁻⁷ M, about 1×10⁻⁸ M, about 0.5×10⁻⁸ M, about 1×10⁻⁹ M, about 0.5×10⁻⁹ M, about 1×10⁻¹⁰ M, about 0.5×10⁻¹⁰ M, about 1×10⁻¹¹ M, or about 0.5×10⁻¹¹ M (inclusive); about 0.5×10⁻¹¹ M to about 1×10⁻⁵ M, about 0.5×10⁻⁵ M, about 1×10⁻⁶ M, about 0.5×10⁻⁶ M, about 1×10⁷ M, about 0.5×10⁻⁷ M, about 1×10⁻⁸ M, about 0.5×10⁻⁸ M, about 1×10⁻⁹ M, about 0.5×10⁻⁹ M, about 1×10⁻¹⁰ M, about 0.5×10⁻¹⁰ M, or about 1×10⁻¹¹ M (inclusive); about 1×10⁻¹¹ M to about 1×10⁻⁵ M, about 0.5×10⁻⁵ M, about 1×10⁻⁶ M, about 0.5×10⁻⁶ M, about 1×10⁷ M, about 0.5×10⁻⁷ M, about 1×10⁻⁸ M, about 0.5×10⁻⁸ M, about 1×10⁻⁹M, about 0.5×10⁻⁹ M, about 1×10⁻¹⁰M, or about 0.5×10⁻¹⁰ M (inclusive); about 0.5×10⁻¹⁰ M to about 1×10⁻⁵ M, about 0.5×10⁻⁵ M, about 1×10⁻⁶ M, about 0.5×10⁻⁶ M, about 1×10⁻⁷M, about 0.5×10⁻⁷M, about 1×10⁻⁸ M, about 0.5×10⁻⁸ M, about 1×10⁻⁹ M, about 0.5×10⁻⁹ M, or about 1×10⁻¹⁰ M (inclusive); about 1×10⁻¹⁰ M to about 1×10⁻⁵ M, about 0.5×10⁻⁵ M, about 1×10⁻⁶ M, about 0.5×10⁻⁶ M, about 1×10⁻⁷ M, about 0.5×10⁻⁷ M, about 1×10⁻⁸ M, about 0.5×10⁻⁸ M, about 1×10⁻⁹ M, or about 0.5×10⁻⁹ M (inclusive); about 0.5×10⁻⁹ M to about 1×10⁻⁵ M, about 0.5×10⁻⁵ M, about 1×10⁻⁶ M, about 0.5×10⁻⁶ M, about 1×10⁷ M, about 0.5×10⁻⁷ M, about 1×10⁻⁸ M, about 0.5×10⁻⁸ M, or about 1×10⁻⁹ M (inclusive); about 1×10⁻⁹ M to about 1×10⁻⁵ M, about 0.5×10⁻⁵ M, about 1×10⁻⁶ M, about 0.5×10⁻⁶ M, about 1×10⁷ M, about 0.5×10⁻⁷ M, about 1×10⁻⁸ M, or about 0.5×10⁻⁸ M (inclusive); about 0.5×10⁻⁸ M to about 1×10⁻⁵ M, about 0.5×10⁻⁵ M, about 1×10⁻⁶ M, about 0.5×10⁻⁶ M, about 1×10⁷ M, about 0.5×10⁻⁷ M, or about 1×10⁻⁸ M (inclusive); about 1×10⁻⁸ M to about 1×10⁻⁵ M, about 0.5×10⁻⁵ M, about 1×10⁻⁶ M, about 0.5×10⁻⁶ M, about 1×10⁷ M, or about 0.5×10⁻⁷ M (inclusive); about 0.5×10⁻⁷ M to about 1×10⁻⁵ M, about 0.5×10⁻⁵ M, about 1×10⁻⁶ M, about 0.5×10⁻⁶ M, or about 1×10⁻⁷ M (inclusive); about 1×10⁻⁷ M to about 1×10⁻⁵ M, about 0.5×10⁻⁵ M, about 1×10⁻⁶ M, or about 0.5×10⁻⁶ M (inclusive); about 0.5×10⁻⁶ M to about 1×10⁻⁵ M, about 0.5×10⁻⁵ M, or about 1×10⁻⁶ M (inclusive); about 1×10⁻⁶ M to about 1×10⁻⁵ M or about 0.5×10⁻⁵ M (inclusive); or about 0.5×10⁻⁵ M to about 1×10⁻⁵ M (inclusive), e.g., as measured in phosphate buffered saline using surface plasmon resonance (SPR).

[0750] In some embodiments, any of the antibodies or antigen-binding fragments described herein has a K_{off} of about 1×10⁻⁶ s⁻¹ to about 1×10⁻³ s⁻¹, about 0.5×10⁻³ s⁻¹, about 1×10⁻⁴ s⁻¹, about 0.5×10⁻⁴ s⁻¹, about 1×10⁻⁵ s⁻¹, or about 0.5×10⁻⁵ s⁻¹ (inclusive); about 0.5×10⁻⁵ s⁻¹ to about 1×10⁻³ s⁻¹, about 0.5×10⁻³ s⁻¹, about 1×10⁻⁴ s⁻¹, about 0.5×10⁻⁴ s⁻¹, or about 1×10⁻⁵ s⁻¹ (inclusive); about 1×10⁻⁵ s⁻¹ to about 1×10⁻³ s⁻¹, about 0.5×10⁻³ s⁻¹, about 1×10⁻⁴ s⁻¹, or about 0.5×10⁻⁴ s⁻¹ (inclusive); about 0.5×10⁻⁴ s⁻¹ to about 1×10⁻³ s⁻¹, about 0.5×10⁻³ s⁻¹, or about 1×10⁻⁴ s⁻¹ (inclusive); about 1×10⁻⁴ s⁻¹ to about 1×10⁻³ s⁻¹, or about 0.5×10⁻³ s⁻¹ (inclusive); or about 0.5×10⁻⁵ s⁻¹ to about 1×10⁻³ s⁻¹ (inclusive), e.g., as measured in phosphate buffered saline using surface plasmon resonance (SPR).

[0751] In some embodiments, any of the antibodies or antigen-binding fragments described herein has a Kₒₙ of about 1×10² M-IS-1 to about 1×10⁶ M⁻¹s⁻¹, about 0.5×10⁶ M⁻¹s⁻¹, about 1×10⁵ M⁻¹s⁻¹, about 0.5×10⁵ M⁻¹s⁻¹, about 1×10⁴ M⁻¹s⁻¹, about 0.5×10⁴ M⁻¹s⁻¹, about 1×10³ M⁻¹s⁻¹, or about 0.5×10³ M⁻¹s⁻¹(inclusive); about 0.5×10³ M⁻¹s⁻¹ to about 1×10⁶ M⁻¹s⁻¹, about 0.5×10⁶ M⁻¹s⁻¹, about 1×10⁵ M⁻¹s⁻¹, about 0.5×10⁵ M⁻¹s⁻¹, about 1×10⁴ M⁻¹s⁻¹, about 0.5×10⁴ M⁻¹s⁻¹, or about 1×10³ M⁻¹s⁻¹ (inclusive); about 1×10³ M⁻¹s⁻¹ to about 1×10⁶M⁻¹s⁻¹, about 0.5×10⁶ M⁻¹s⁻¹, about 1×10⁵ M⁻¹s⁻¹, about 0.5×10⁵ M⁻¹s⁻¹, about 1×10⁴ M⁻¹s⁻¹, or about 0.5×10⁴ M⁻¹s⁻¹ (inclusive); about 0.5×10⁴ M⁻¹s⁻¹ to about 1×10⁶ M⁻¹s⁻¹, about 0.5×10⁶ M⁻¹s⁻¹, about 1×10⁵ M⁻¹s⁻¹, about 0.5×10⁵ M⁻¹s⁻¹, or about 1×10⁴ M⁻¹s⁻¹ (inclusive); about 1×10⁴ M⁻¹s⁻¹ to about 1×10⁶ M⁻¹s⁻¹, about 0.5×10⁶ M⁻¹s⁻¹, about 1×10⁵ M⁻¹s⁻¹, or about 0.5×10⁵ M⁻¹s⁻¹(inclusive); about 0.5×10⁵ M⁻¹s⁻¹ to about 1×10⁶ M⁻¹s⁻¹, about 0.5×10⁶ M⁻¹s⁻¹, or about 1×10⁵ M⁻¹s⁻¹(inclusive); about 1×10⁵ M⁻¹s⁻¹ to about 1×10⁶ M⁻¹s⁻¹, or about 0.5×10⁶ M⁻¹s⁻¹ (inclusive); or about 0.5×10⁶ M⁻¹s⁻¹ to about 1×10⁶ M⁻¹s⁻¹ (inclusive), e.g., as measured in phosphate buffered saline using surface plasmon resonance (SPR).

### Cells Producing a Recombinant IL-10

[0752] In some embodiments, any of the devices or compositions described herein can include a recombinant cell (e.g., a recombinant mammalian cell) that secretes a recombinant IL-10 (e.g., any of the recombinant IL-10 proteins described herein). In some embodiments, any of the devices or compositions described herein can include a cell (e.g., a mammalian cell) that secretes IL-10 (e.g., human IL-10). In some embodiments, the mammalian cell can be a mammalian cell obtained from the subject, and after introduction of a nucleic acid encoding the recombinant IL-10 (e.g., any of the recombinant IL-10 proteins described herein) into the cell obtained from the subject, the cell is incorporated into any of the compositions or devices described herein.

[0753] A recombinant cell can be generated by introducing a vector including a nucleic acid sequence encoding a recombinant IL-10 protein (e.g., any of the recombinant IL-10 proteins described herein). In some embodiments, the vector or the nucleic acid sequence encoding a recombinant IL-10 protein is integrated into a chromosome of the recombinant mammalian cell. In some embodiments, the vector or the nucleic acid sequence encoding a recombinant IL-10 protein is not integrated into a chromosome of the recombinant mammalian cell.

[0754] A vector can be a viral vector. Non-limiting examples of viral vectors include adenovirus vectors, herpes virus vectors, baculovirus vectors, and retroviral vectors. An expression vector can also be a plasmid or a cosmid. Additional examples of vectors are known in the art.

[0755] A vector can include a promoter sequence operably linked to the nucleic acid sequence encoding a recombinant IL-10 protein (e.g., any of the recombinant IL-10 proteins described herein). Non-limiting examples of promoter sequences that can be operably linked to the sequence (e.g., cDNA) encoding a recombinant IL-10 protein (e.g., any of the recombinant IL-10 proteins described herein) include: Simian Virus 40 (SV40) early promoter, ribosomal protein 21 (rpS21) promoter, hamster β-actin promoter, cytomegalovirus (CMV) promoter (e.g., CMV immediate early promoter (see, e.g., Teschendorf et al., Anticancer Res. 22:3325-3330, 2002), ubiquitin C (UBC) promoter, elongation factor 1-α (EF1A) promoter, phosphoenolpyruvate carboxykinase (PCK) promoter, IE2 promoter/enhancer region from mouse CMV (see, e.g., Chatellard et al., Biotechnol. Bioeng. 96:106-117, 2007), and chicken j-actin promoter. Additional non-limiting examples of human gene promoters that can be used in any of the vectors described herein are described in the Mammalian Promoter Database (Wistar Institute website at mrpombdb.wister.upenn.edu). Additional examples of mammalian promoter sequences that can be used in the expression vectors are known in the art.

[0756] Non-limiting examples of methods that can be used to introduce a vector or a nucleic acid into a cell (e.g., a mammalian cell) include lipofection, transfection, electroporation, microinjection, calcium phosphate transfection, dendrimer-based transfection, cationic polymer transfection, cell squeezing, sonoporation, optical transfection, impalection, hydrodynamic delivery, magnetofection, viral transduction (e.g., adenoviral and lentiviral transduction), and nanoparticle transfection. These and other methods of introducing a vector or a nucleic acid into a cell are well known in the art.

[0757] In some examples, the recombinant mammalian cell can be a Chinese Hamster Ovary (CHO) cell, a B cell, a CD8⁺ T cell, a dendritic cell, a keratinocyte or an epithelial cell. See, e.g., Mosser et al., Immunol. Rev. 226:205-218, 2009; Fillatreau et al., Nat. Rev. Immunol. 8:391-397, 2008; Ryan et al., Crit. Rev. Immunol. 27:15-32, 2007; Moore et al., Annu. Rev. Immunol. 19:683-765, 2001. In some embodiments, the recombinant mammalian cell can be a mesenchymal stem cell (e.g., Gupte et al., Biomed. J. 40(1):49-54, 2017).

[0758] Nucleic Acids and Vectors the Encode an IL-10 Receptor Agonist

[0759] In some examples, an IL-10 receptor agonist can be a nucleic acid (e.g., a vector) that includes a sequence encoding an IL-10 receptor agonist (e.g., any of the IL-10 proteins described herein). In some embodiments, the nucleic acid includes a sequence encoding IL-10 (e.g., human IL-10). In some embodiments, the nucleic acid includes a sequence encoding a recombinant IL-10 (e.g., a recombinant human IL-10). In some examples, the sequence encoding an IL-10 receptor agonist can be SEQ ID NO: 141. In some embodiments, the sequence encoding an IL-10 receptor agonist can include a sequence that is at least 80% (e.g., at least 82%, at least 84%, at least 86%, at least 88%, at least 90%, at least 92%, at least 94%, at least 95%, at least 96%, at least 98%, or at least 99%) identical to SEQ ID NO: 141.

[0760] The nucleic acid can be, e.g., a vector. In some embodiments, a vector can be a viral vector (e.g., an adenovirus vector, a herpes virus vector, a baculovirus vector, or a retrovirus vector). A vector can also be, e.g., a plasmid or a cosmid. Additional examples of vectors are known in the art.

[0761] A vector can include a promoter sequence operably linked to the sequence encoding an IL-10 receptor agonist (e.g., any of the recombinant IL-10 proteins described herein). Non-limiting examples of promoter sequences that can be operably linked to the sequence encoding an IL-10 receptor agonist (e.g., any of the recombinant IL-10 proteins described herein) include: Simian Virus 40 (SV40) early promoter, ribosomal protein 21 (rpS21) promoter, hamster β-actin promoter, cytomegalovirus (CMV) promoter (e.g., CMV immediate early promoter (see, e.g., Teschendorf et al., Anticancer Res. 22:3325-3330, 2002), ubiquitin C (UBC) promoter, elongation factor 1-α (EF1A) promoter, phosphoenolpyruvate carboxykinase (PCK) promoter, IE2 promoter/enhancer region from mouse CMV (see, e.g., Chatellard et al., Biotechnol. Bioeng. 96:106-117, 2007), and chicken β-actin promoter. Additional non-limiting examples of human gene promoters that can be used in any of the vectors described herein are described in the Mammalian Promoter Database (Wistar Institute website at mrpombdb.wister.upenn.edu). A promoter can be a constitutive promoter or an inducible promoter. Examples of constitutive promoters and inducible promoters are known in the art. Additional examples and features of mammalian promoter sequences that can be used in the expression vectors are known in the art.

[0762] A non-limiting example of a composition including a nucleic acid that encodes an IL-10 receptor agonist is XT-150 (Xalud Therapeutics).

### Additional Examples of IL-10 Receptor Agonists

[0763] In some embodiments, the recombinant cell is a recombinant Gram-positive bacterial cell (e.g., a genetically modified Lactococcus lactis (LL-Thy12) (see, e.g., Steidler et al., Science 289:1352-1355, 2000; Braat et al., Clin. Gastroenterol. Heptal. 4:754-759, 2006). In some embodiments, the recombinant cell is a recombinant Gram-negative bacterial cell (e.g., a Shigellaflexneri cell) that secretes an IL-10 receptor agonist (e.g., a recombinant IL-10 protein) (Chamekh et al., J. Immunol. 180(6): 4292-4298, 2008).

[0764] In some embodiments, the IL-10 receptor agonist is a cell (e.g., a Clostridium butyricum cell) that induces IL-10 production and secretion by a different cell (e.g., a macrophage) (e.g., Hayashi et al., Cell Host Microbe 13:711-722, 2013). In some embodiments, the IL-10 receptor agonist is a recombinant bacterial cell (e.g., a Lactobacillus acidophilus cell) that is deficient in lipoteichoic acid and induces IL-10 production and secretion by a different cell (e.g., a dendritic cell) (e.g., Mohamadzadeh et al., Proc. Natl. Acad. Sci. U.S.A. 108(suppl 1):4623-4630, 2011; Konstantinov et al., Proc. Natl. Acad. Sci. U.S.A. 105(49):19474-9, 2008). In some embodiments, the IL-10 receptor agonist is a bacterial cell or a fragment of a bacterial cell that is maintained in the supernatant that induces IL-10 secretion in a different cell (e.g., an immune cell) (e.g., a Faecalibacterium prausnitzii cell or a Faecalibacterium prausnitzii supernatant) (see, e.g., Sokol et al., Proc. Natl. Acad. Sci. U.S.A. 105(43):16731-16736, 2008).

[0765] Additional examples of other IL-10 receptor agonists are described in, e.g., U.S. Pat. No. 6,936,586; WO 96/01318; WO 91/00349; WO 13/130913; each incorporated in its entirety herein.

### Integrin Inhibitors

[0766] The term “integrin inhibitor” refers to an agent which decreases the expression of one or more integrins and/or decreases the binding of an integrin ligand to one or more integrins that play a role in the recruitment, extravasation, and/or activation of a leukocyte. In some embodiments, the integrin inhibitor specifically binds to at least a portion of a ligand binding site on a target integrin. In some embodiments, the integrin inhibitor specifically binds to a target integrin at the same site as an endogenous ligand. In some embodiments, the integrin inhibitor decreases the level of expression of the target integrin in a mammalian cell. In some embodiments, the integrin inhibitor specifically binds to an integrin ligand.

[0767] Non-limiting examples of integrins that can be targeted by any of the integrin inhibitors described herein include: α2β1 integrin, α1β1 integrin, α4β7 integrin, integrin α4β1 (VLA-4), E-selectin, ICAM-1, α5β1 integrin, α4β1 integrin, VLA-4, α2β1 integrin, α5β3 integrin, α5β5 integrin, αIIbβ3 integrin, and MAdCAM-1. A non-limiting example of integrin inhibitor that can decrease the expression and/or activity of α4β7 integrin is FTY720. A non-limiting example of an integrin inhibitor that specifically targets MAdCAM is PF-547659 (Pfizer). Non-limiting examples of an integrin inhibitor that specifically targets α4β7 is AJM300 (Ajinomoto), etrolizumab (Genentech), and vedolizumab (Millenium/Takeda).

[0768] In some embodiments, the integrin inhibitor is an αIIbβ3 integrin inhibitor. In some embodiments, the αIIbβ3 integrin inhibitor is abciximab (ReoPro®, c7E3; Kononczuk et al., Curr. Drug Targets 16(13):1429-1437, 2015; Jiang et al., Appl. Microbiol. Biotechnol. 98(1):105-114, 2014), eptifibatide (Integrilin; Scarborough et al., J. Biol. Chem. 268:1066-1073, 1993; Tcheng et al., Circulation 91:2151-2157, 1995) or tirofiban (Aggrastat®; Hartman et al., J. Med. Chem. 35:4640-4642, 1992; Pierro et al., Eur. J. Ophthalmol. 26(4):e74-76, 2016; Guan et al., Eur. J. Pharmacol 761:144-152, 2015). In some embodiments, the integrin inhibitor is an αL-selective integrin inhibitor. In some embodiments, the integrin inhibitor is a β2 integrin inhibitor.

[0769] In some embodiments, the integrin inhibitor is an α4 integrin (e.g., an α4β1 integrin (e.g., Very Late Antigen-4 (VLA-4), CD49d, or CD29)) inhibitor, an α4β7 integrin inhibitor. In some embodiments, the integrin inhibitor targets endothelial VCAM1, fibronectin, mucosal addressin cellular adhesion molecule-1 (MAdCAM-1), vitronectin, tenascin-C, osteopontin (OPN), nephronectin, agiostatin, tissue-type transglutaminase, factor XIII, Von Willebrand factor (VWF), an ADAM protein, an ICAM protein, collagen, e-cadherin, laminin, fibulin-5, or TGFβ. In some embodiments, the α4 integrin inhibitor is natalizumab (Tysabri®; Targan et al., Gastroenterology 132(5):1672-1683, 2007; Sandborn et al., N. Engl. J. Med. 353(18):1912-1925, 2005; Nakamura et al., Intern. Med. 56(2):211-214, 2017; and Singh et al., J Pediatr. Gastroenterol. Nutr. 62(6):863-866, 2016). In some embodiments, the integrin inhibitor is an endogenous integrin inhibitor (e.g., SHARPIN (Rantala et al., Nat. Cell. Biol. 13(11):1315-1324, 2011).

[0770] In some embodiments, the integrin inhibitor is an αv integrin (e.g., an α5β1 integrin, an α5β3 integrin, an α5β5 integrin inhibitor, and/or an α5β6 integrin) inhibitor.

[0771] In some embodiments, the integrin inhibitor is an α5β1 integrin inhibitor.

[0772] In some embodiments, an integrin inhibitor is an inhibitory nucleic acid, an antibody or antigen-binding fragment thereof, a fusion protein, an integrin antagonist, a cyclic peptide, a disintegrin, a peptidomimetic, or a small molecule. In some embodiments, the inhibitory nucleic acid is a small hairpin RNA, a small interfering RNA, an antisense, an aptamer, or a microRNA.

### Inhibitory Nucleic Acids

[0773] As described herein, inhibitory nucleic acids specifically bind (e.g., hybridize) to a nucleic acid encoding an integrin or an integrin ligand to treat inflammatory diseases (e.g., chronic inflammation, irritable bowel syndrome (IBS), rheumatoid arthritis, ulcerative colitis, Crohn's Disease, or auto-inflammatory disease). In some embodiments, the inhibitory nucleic acid can be an antisense nucleic acid, a ribozyme, a small interfering RNA, a small hairpin RNA, or a microRNA. Examples of aspects of these different inhibitory nucleic acids are described below. Any of the examples of inhibitory nucleic acids that can decrease expression of a target integrin or a target integrin ligand (e.g., any of the exemplary target integrins or any of the exemplary integrin ligands described herein) in a mammalian cell can be synthesized in vitro.

[0774] Inhibitory nucleic acids that can decrease the expression of target integrin mRNA or a target integrin ligand mRNA (e.g., any of the exemplary integrins described herein or any of the exemplary integrin ligands described herein) in a mammalian cell include antisense nucleic acid molecules, i.e., nucleic acid molecules whose nucleotide sequence is complementary to all or part of target integrin mRNA or a target integrin ligand mRNA (e.g., complementary to all or a part of any one of SEQ ID NOs: 155-181).

| Integrin α2 (ITGA) (NCBI Ref.: NM_002203.3) | |
|---|---|
| (SEQ ID NO: 155) | |
| 1 | ttttccctgc tctcaccggg cgggggagag aagccctctg gacagcttct agagtgtgca |
| 61 | ggttctcgta tccctcggcc aagggtatcc tctgcaaacc tctgcaaacc cagcgcaact |
| 121 | acggtccccc ggtcagaccc aggatggggc cagaacggac aggggccgcg ccgctgccgc |
| 181 | tgctgctggt gttagcgctc agtcaaggca ttttaaattg ttgtttggcc tacaatgttg |
| 241 | gtctcccaga agcaaaaata ttttccggtc cttcaagtga acagtttggc tatgcagtgc |
| 301 | agcagtttat aaatccaaaa ggcaactggt tactggttgg ttcaccctgg agtggctttc |
| 361 | ctgagaaccg aatgggagat gtgtataaat gtcctgttga cctatccact gccacatgtg |
| 421 | aaaaactaaa tttgcaaact tcaacaagca ttccaaatgt tactgagatg aaaaccaaca |
| 481 | tgagcctcgg cttgatcctc accaggaaca tgggaactgg aggttttctc acatgtggtc |
| 541 | ctctgtgggc acagcaatgt gggaatcagt attacacaac gggtgtgtgt tctgacatca |
| 601 | gtcctgattt tcagctctca gccagcttct cacctgcaac tcagccctgc ccttccctca |
| 661 | tagatgttgt ggttgtgtgt gatgaatcaa atagtattta tccttgggat gcagtaaaga |
| 721 | attttttgga aaaatttgta caaggcctgg atataggccc cacaaagaca caggtggggt |
| 781 | taattcagta tgccaataat ccaagagttg tgtttaactt gaacacatat aaaaccaaag |
| 841 | aagaaatgat tgtagcaaca tcccagacat cccaatatgg tggggacctc acaaacacat |
| 901 | tcggagcaat tcaatatgca agaaaatatg cttattcagc agcttctggt gggcgacgaa |
| 961 | gtgctacgaa agtaatggta gttgtaactg acggtgaatc acatgatggt tcaatgttga |
| 1021 | aagctgtgat tgatcaatgc aaccatgaca atatactgag gtttggcata gcagttcttg |
| 1081 | ggtacttaaa cagaaacgcc cttgatacta aaaatttaat aaaagaaata aaagcaatcg |
| 1141 | ctagtattcc aacagaaaga tactttttca atgtgtctga tgaagcagct ctactagaaa |
| 1201 | aggctgggac attaggagaa caaattttca gcattgaagg tactgttcaa ggaggagaca |
| 1261 | actttcagat ggaaatgtca caagtgggat tcagtgcaga ttactcttct caaaatgata |
| 1321 | ttctgatgct gggtgcagtg ggagcttttg gctggagtgg gaccattgtc cagaagacat |
| 1381 | ctcatggcca tttgatcttt cctaaacaag cctttgacca aattctgcag gacagaaatc |
| 1441 | acagttcata tttaggttac tctgtggctg caatttctac tggagaaagc actcactttg |
| 1501 | ttgctggtgc tcctcgggca aattataccg gccagatagt gctatatagt gtgaatgaga |
| 1561 | atggcaatat cacggttatt caggctcacc gaggtgacca gattggctcc tattttggta |
| 1621 | gtgtgctgtg ttcagttgat gtggataaag acaccattac agacgtgctc ttggtaggtg |
| 1681 | caccaatgta catgagtgac ctaaagaaag aggaaggaag agtctacctg tttactatca |
| 1741 | aagagggcat tttgggtcag caccaatttc ttgaaggccc cgagggcatt gaaaacactc |
| 1801 | gatttggttc agcaattgca gctctttcag acatcaacat ggatggcttt aatgatgtga |
| 1861 | ttgttggttc accactagaa aatcagaatt ctggagctgt atacatttac aatggtcatc |
| 1921 | agggcactat ccgcacaaag tattcccaga aaatcttggg atccgatgga gcctttagga |
| 1981 | gccatctcca gtactttggg aggtccttgg atggctatgg agatttaaat ggggattcca |
| 2041 | tcaccgatgt gtctattggt gcctttggac aagtggttca actctggtca caaagtattg |
| 2101 | ctgatgtagc tatagaagct tcattcacac cagaaaaaat cactttggtc aacaagaatg |
| 2161 | ctcagataat tctcaaactc tgcttcagtg caaagttcag acctactaag caaaacaatc |
| 2221 | aagtggccat tgtatataac atcacacttg atgcagatgg attttcatcc agagtaacct |
| 2281 | ccagggggtt atttaaagaa aacaatgaaa ggtgcctgca gaagaatatg gtagtaaatc |
| 2341 | aagcacagag ttgccccgag cacatcattt atatacagga gccctctgat gttgtcaact |
| 2401 | ctttggattt gcgtgtggac atcagtctgg aaaaccctgg cactagccct gcccttgaag |
| 2461 | cctattctga gactgccaag gtcttcagta ttcctttcca caaagactgt ggtgaggacg |
| 2521 | gactttgcat ttctgatcta gtcctagatg tccgacaaat accagctgct caagaacaac |
| 2581 | cctttattgt cagcaaccaa aacaaaaggt taacattttc agtaacgctg aaaaataaaa |
| 2641 | gggaaagtgc atacaacact ggaattgttg ttgatttttc agaaaacttg ttttttgcat |
| 2701 | cattctccct gccggttgat gggacagaag taacatgcca ggtggctgca tctcagaagt |
| 2761 | ctgttgcctg cgatgtaggc taccctgctt taaagagaga acaacaggtg acttttacta |
| 2821 | ttaactttga cttcaatctt caaaaccttc agaatcaggc gtctctcagt ttccaagcct |
| 2881 | taagtgaaag ccaagaagaa aacaaggctg ataatttggt caacctcaaa attcctctcc |
| 2941 | tgtatgatgc tgaaattcac ttaacaagat ctaccaacat aaatttttat gaaatctctt |
| 3001 | cggatgggaa tgttccttca atcgtgcaca gttttgaaga tgttggtcca aaattcatct |
| 3061 | tctccctgaa ggtaacaaca ggaagtgttc cagtaagcat ggcaactgta atcatccaca |
| 3121 | tccctcagta taccaaagaa aagaacccac tgatgtacct aactggggtg caaacagaca |
| 3181 | aggctggtga catcagttgt aatgcagata tcaatccact gaaaatagga caaacatctt |
| 3241 | cttctgtatc tttcaaaagt gaaaatttca ggcacaccaa agaattgaac tgcagaactg |
| 3301 | cttcctgtag taatgttacc tgctggttga aagacgttca catgaaagga gaatactttg |
| 3361 | ttaatgtgac taccagaatt tggaacggga ctttcgcatc atcaacgttc cagacagtac |
| 3421 | agctaacggc agctgcagaa atcaacacct ataaccctga gatatatgtg attgaagata |
| 3481 | acactgttac gattcccctg atgataatga aacctgatga gaaagccgaa gtaccaacag |
| 3541 | gagttataat aggaagtata attgctggaa tccttttgct gttagctctg gttgcaattt |
| 3601 | tatggaagct cggcttcttc aaaagaaaat atgaaaagat gaccaaaaat ccagatgaga |
| 3661 | ttgatgagac cacagagctc agtagctgaa ccagcagacc tacctgcagt gggaaccggc |
| 3721 | agcatcccag ccagggtttg ctgtttgcgt gaatggattt ctttttaaat cccatatttt |
| 3781 | ttttatcatg tcgtaggtaa actaacctgg tattttaaga gaaaactgca ggtcagtttg |
| 3841 | gaatgaagaa attgtggggg gtgggggagg tgcggggggc aggtagggaa ataataggga |
| 3901 | aaatacctat tttatatgat gggggaaaaa aagtaatctt taaactggct ggcccagagt |
| 3961 | ttacattcta atttgcattg tgtcagaaac atgaaatgct tccaagcatg acaactttta |
| 4021 | aagaaaaata tgatactctc agattttaag ggggaaaact gttctcttta aaatatttgt |
| 4081 | ctttaaacag caactacaga agtggaagtg cttgatatgt aagtacttcc acttgtgtat |
| 4141 | attttaatga atattgatgt taacaagagg ggaaaacaaa acacaggttt tttcaattta |
| 4201 | tgctgctcat ccaaagttgc cacagatgat acttccaagt gataatttta tttataaact |
| 4261 | aggtaaaatt tgttgttggt tccttttaga ccacggctgc cccttccaca ccccatcttg |
| 4321 | ctctaatgat caaaacatgc ttgaataact gagcttagag tatacctcct atatgtccat |
| 4381 | ttaagttagg agagggggcg atatagagaa taaggcacaa aattttgttt aaaactcaga |
| 4441 | atataacatg taaaatccca tctgctagaa gcccatcctg tgccagagga aggaaaagga |
| 4501 | ggaaatttcc tttctctttt aggaggcaca acagttctct tctaggattt gtttggctga |
| 4561 | ctggcagtaa cctagtgaat ttctgaaaga tgagtaattt ctttggcaac cttcctcctc |
| 4621 | ccttactgaa ccactctccc acctcctggt ggtaccatta ttatagaagc cctctacagc |
| 4681 | ctgactttct ctccagcggt ccaaagttat cccctccttt acccctcatc caaagttccc |
| 4741 | actccttcag gacagctgct gtgcattaga tattaggggg gaaagtcatc tgtttaattt |
| 4801 | acacacttgc atgaattact gtatataaac tccttaactt cagggagcta ttttcattta |
| 4861 | gtgctaaaca agtaagaaaa ataagctcga gtgaatttct aaatgttgga atgttatggg |
| 4921 | atgtaaacaa tgtaaagtaa gacatctcag gatttcacca gaagttacag atgaggcact |
| 4981 | ggaagccacc aaattagcag gtgcaccttc tgtggctgtc ttgtttctga agtacttaaa |
| 5041 | cttccacaag agtgaatttg acctaggcaa gtttgttcaa aaggtagatc ctgagatgat |
| 5101 | ttggtcagat tgggataagg cccagcaatc tgcattttaa caagcacccc agtcactagg |
| 5161 | atgcagatgg accacacttt gagaaacacc acccatttct actttttgca ccttattttc |
| 5221 | tctgttcctg agcccccaca ttctctagga gaaacttaga ggaaaagggc acagacacta |
| 5281 | catatctaaa gctttggaca agtccttgac ctctataaac ttcagagtcc tcattataaa |
| 5341 | atgggaagac tgagctggag ttcagcagtg atgcttttag ttttaaaagt ctatgatctg |
| 5401 | gacttcctat aatacaaata cacaatcctc caagaatttg acttggaaaa aaatgtcaaa |
| 5461 | ggaaaacagg ttatctgccc atgtgcatat ggacaacctt gactaccctg gcctggcccg |
| 5521 | tggtggcagt ccagggctat ctgtactgtt tacagaatta ctttgtagtt gacaacacaa |
| 5581 | aacaaacaaa aaaggcataa aatgccagcg gtttatagaa aaaacagcat ggtattctcc |
| 5641 | agttaggtat gccagagtcc aattctttta acagctgtga gaatttgctg cttcattcca |
| 5701 | acaaaatttt atttaaaaaa aaaaaaaaaa gactggagaa actagtcatt agcttgataa |
| 5761 | agaatattta acagctagtg gtgctggtgt gtacctgaag ctccagctac ttgagagact |
| 5821 | gagacaggaa gatcgcttga gcccaggagt tcaagtccag cctaagcaac atagcaagac |
| 5881 | cctgtctcaa aaaaatgact atttaaaaag acaatgtggc caggcacggt ggctcacacc |
| 5941 | tgtaatccca acactttggg aggctgaggc cggtggatca cgaggtcagg agtttgagac |
| 6001 | tagcctggcc aacatggtga aaccccatct ctaataatat aaaaattagc tgggcgtagt |
| 6061 | agcaggtgcc tgtaatccca gttactcggg aagctgaggc aggagaatca cttgaacccg |
| 6121 | ggaggcagag gtttcagtga gccgagatcg cgccactgca ctccagcctg ggtgacaggg |
| 6181 | caagactctg tctcaaacaa acaaacaaaa aaaaagttag tactgtatat gtaaatacta |
| 6241 | gcttttcaat gtgctataca aacaattata gcacatcctt ccttttactc tgtctcacct |
| 6301 | cctttaggtg agtacttcct taaataagtg ctaaacatac atatacggaa cttgaaagct |
| 6361 | ttggttagcc ttgccttagg taatcagcct agtttacact gtttccaggg agtagttgaa |
| 6421 | ttactataaa ccattagcca cttgtctctg caccatttat cacaccagga cagggtctct |
| 6481 | caacctgggc gctactgtca tttggggcca ggtgattctt ccttgcaggg gctgtcctgt |
| 6541 | accttgtagg acagcagccc tgtcctagaa ggtatgttta gcagcattcc tggcctctag |
| 6601 | ctacccgatg ccagagcatg ctccccccgc agtcatgaca atcaaaaaat gtctccagac |
| 6661 | attgtcaaat gcctcctggg gggcagtatt tctcaagcac ttttaagcaa aggtaagtat |
| 6721 | tcatacaaga aatttagggg gaaaaaacat tgtttaaata aaagctatgt gttcctattc |
| 6781 | aacaatattt ttgctttaaa agtaagtaga gggcataaaa gatgtcatat tcaaatttcc |
| 6841 | atttcataaa tggtgtacag acaaggtcta tagaatgtgg taaaaacttg actgcaacac |
| 6901 | aaggcttata aaatagtaag atagtaaaat agcttatgaa gaaactacag agatttaaaa |
| 6961 | ttgtgcatga ctcatttcag cagcaaaata agaactccta actgaacaga aatttttcta |
| 7021 | cctagcaatg ttattcttgt aaaatagtta cctattaaaa ctgtgaagag taaaactaaa |
| 7081 | gccaatttat tatagtcaca caagtgatta tactaaaaat tattataaag gttataattt |
| 7141 | tataatgtat ttacctgtcc tgatatatag ctataaccca atatatgaaa atctcaaaaa |
| 7201 | ttaagacatc atcatacaga aggcaggatt ccttaaactg agatccctga tccatcttta |
| 7261 | atatttcaat ttgcacacat aaaacaatgc ccttttgtgt acattcaggc atacccattt |
| 7321 | taatcaattt gaaaggttaa tttaaacctc tagaggtgaa tgagaaacat gggggaaaag |
| 7381 | tatgaaatag gtgaaaatct taactatttc tttgaactct aaagactgaa actgtagcca |
| 7441 | ttatgtaaat aaagtttcat atgtacctgt ttattttggc agattaagtc aaaatatgaa |
| 7501 | tgtatatatt gcataactat gttagaattg tatatatttt aaagaaattg tcttggatat |
| 7561 | tttcctttat acataataga taagtctttt ttcaaatgtg gtgtttgatg tttttgatta |
| 7621 | aatgtgtttt gcctctttcc acaaaaactg taaaaataaa tgcatgtttg tacaaaaagt |
| 7681 | tgcagaattc atttgattta tgagaaacaa aaattaaatt gtagtcaaca gttagtagtt |
| 7741 | tttctcatat ccaagtataa caaacagaaa agtttcatta ttgtaaccca cttttttcat |
| 7801 | accacattat tgaatattgt tacaattgtt ttgaaaataa agccattttc tttgggcttt |
| 7861 | tataagttaa aaaaaaaa |
| Integrin αIIb (α2b) (NCBI Ref.: NM_000419.4; SEQ ID NO: 156) | |
| 1 | gctctgcccg ttgctcagca agttacttgg ggttccagtt tgataagaaa agacttcctg |
| 61 | tggaggaatc tgaagggaag gaggaggagc tggcccattc ctgcctggga ggttgtggaa |
| 121 | gaaggaagat ggccagagct ttgtgtccac tgcaagccct ctggcttctg gagtgggtgc |
| 181 | tgctgctctt gggaccttgt gctgcccctc cagcctgggc cttgaacctg gacccagtgc |
| 241 | agctcacctt ctatgcaggc cccaatggca gccagtttgg attttcactg gacttccaca |
| 301 | aggacagcca tgggagagtg gccatcgtgg tgggcgcccc gcggaccctg ggccccagcc |
| 361 | aggaggagac gggcggcgtg ttcctgtgcc cctggagggc cgagggcggc cagtgcccct |
| 421 | cgctgctctt tgacctccgt gatgagaccc gaaatgtagg ctcccaaact ttacaaacct |
| 481 | tcaaggcccg ccaaggactg ggggcgtcgg tcgtcagctg gagcgacgtc attgtggcct |
| 541 | gcgccccctg gcagcactgg aacgtcctag aaaagactga ggaggctgag aagacgcccg |
| 601 | taggtagctg ctttttggct cagccagaga gcggccgccg cgccgagtac tccccctgtc |
| 661 | gcgggaacac cctgagccgc atttacgtgg aaaatgattt tagctgggac aagcgttact |
| 721 | gtgaagcggg cttcagctcc gtggtcactc aggccggaga gctggtgctt ggggctcctg |
| 781 | gcggctatta tttcttaggt ctcctggccc aggctccagt tgcggatatt ttctcgagtt |
| 841 | accgcccagg catccttttg tggcacgtgt cctcccagag cctctccttt gactccagca |
| 901 | acccagagta cttcgacggc tactgggggt actcggtggc cgtgggcgag ttcgacgggg |
| 961 | atctcaacac tacagaatat gtcgtcggtg cccccacttg gagctggacc ctgggagcgg |
| 1021 | tggaaatttt ggattcctac taccagaggc tgcatcggct gcgcggagag cagatggcgt |
| 1081 | cgtattttgg gcattcagtg gctgtcactg acgtcaacgg ggatgggagg catgatctgc |
| 1141 | tggtgggcgc tccactgtat atggagagcc gggcagaccg aaaactggcc gaagtggggc |
| 1201 | gtgtgtattt gttcctgcag ccgcgaggcc cccacgcgct gggtgccccc agcctcctgc |
| 1261 | tgactggcac acagctctat gggcgattcg gctctgccat cgcacccctg ggcgacctcg |
| 1321 | accgggatgg ctacaatgac attgcagtgg ctgcccccta cgggggtccc agtggccggg |
| 1381 | gccaagtgct ggtgttcctg ggtcagagtg aggggctgag gtcacgtccc tcccaggtcc |
| 1441 | tggacagccc cttccccaca ggctctgcct ttggcttctc ccttcgaggt gccgtagaca |
| 1501 | tcgatgacaa cggataccca gacctgatcg tgggagctta cggggccaac caggtggctg |
| 1561 | tgtacagagc tcagccagtg gtgaaggcct ctgtccagct actggtgcaa gattcactga |
| 1621 | atcctgctgt gaagagctgt gtcctacctc agaccaagac acccgtgagc tgcttcaaca |
| 1681 | tccagatgtg tgttggagcc actgggcaca acattcctca gaagctatcc ctaaatgccg |
| 1741 | agctgcagct ggaccggcag aagccccgcc agggccggcg ggtgctgctg ctgggctctc |
| 1801 | aacaggcagg caccaccctg aacctggatc tgggcggaaa gcacagcccc atctgccaca |
| 1861 | ccaccatggc cttccttcga gatgaggcag acttccggga caagctgagc cccattgtgc |
| 1921 | tcagcctcaa tgtgtcccta ccgcccacgg aggctggaat ggcccctgct gtcgtgctgc |
| 1981 | atggagacac ccatgtgcag gagcagacac gaatcgtcct ggactgtggg gaagatgacg |
| 2041 | tatgtgtgcc ccagcttcag ctcactgcca gcgtgacggg ctccccgctc ctagttgggg |
| 2101 | cagataatgt cctggagctg cagatggacg cagccaacga gggcgagggg gcctatgaag |
| 2161 | cagagctggc cgtgcacctg ccccagggcg cccactacat gcgggcccta agcaatgtcg |
| 2221 | agggctttga gagactcatc tgtaatcaga agaaggagaa tgagaccagg gtggtgctgt |
| 2281 | gtgagctggg caaccccatg aagaagaacg cccagatagg aatcgcgatg ttggtgagcg |
| 2341 | tggggaatct ggaagaggct ggggagtctg tgtccttcca gctgcagata cggagcaaga |
| 2401 | acagccagaa tccaaacagc aagattgtgc tgctggacgt gccggtccgg gcagaggccc |
| 2461 | aagtggagct gcgagggaac tcctttccag cctccctggt ggtggcagca gaagaaggtg |
| 2521 | agagggagca gaacagcttg gacagctggg gacccaaagt ggagcacacc tatgagctcc |
| 2581 | acaacaatgg ccctgggact gtgaatggtc ttcacctcag catccacctt ccgggacagt |
| 2641 | cccagccctc cgacctgctc tacatcctgg atatacagcc ccaggggggc cttcagtgct |
| 2701 | tcccacagcc tcctgtcaac cctctcaagg tggactgggg gctgcccatc cccagcccct |
| 2761 | cccccattca cccggcccat cacaagcggg atcgcagaca gatcttcctg ccagagcccg |
| 2821 | agcagccctc gaggcttcag gatccagttc tcgtaagctg cgactcggcg ccctgtactg |
| 2881 | tggtgcagtg tgacctgcag gagatggcgc gcgggcagcg ggccatggtc acggtgctgg |
| 2941 | ccttcctgtg gctgcccagc ctctaccaga ggcctctgga tcagtttgtg ctgcagtcgc |
| 3001 | acgcatggtt caacgtgtcc tccctcccct atgcggtgcc cccgctcagc ctgccccgag |
| 3061 | gggaagctca ggtgtggaca cagctgctcc gggccttgga ggagagggcc attccaatct |
| 3121 | ggtgggtgct ggtgggtgtg ctgggtggcc tgctgctgct caccatcctg gtcctggcca |
| 3181 | tgtggaaggt cggcttcttc aagcggaacc ggccacccct ggaagaagat gatgaagagg |
| 3241 | gggagtgatg gtgcagccta cactattcta gcaggagggt tgggcgtgct acctgcaccg |
| 3301 | ccccttctcc aacaagttgc ctccaagctt tgggttggag ctgttccatt gggtcctctt |
| 3361 | ggtgtcgttt ccctcccaac agagctgggc taccccccct cctgctgcct aataaagaga |
| 3421 | ctgagccctg aaaaaaaaaa aaaaaaaaa |
| Integrin α4 (VLA-4) (NCBI Ref.: NM_000885.5; SEQ ID NO: 157) | |
| 1 | ataacgtctt tgtcactaaa atgttcccca ggggccttcg gcgagtcttt ttgtttggtt |
| 61 | ttttgttttt aatctgtggc tcttgataat ttatctagtg gttgcctaca cctgaaaaac |
| 121 | aagacacagt gtttaactat caacgaaaga actggacggc tccccgccgc agtcccactc |
| 181 | cccgagtttg tggctggcat ttgggccacg ccgggctggg cggtcacagc gaggggcgcg |
| 241 | cagtttgggg tcacacagct ccgcttctag gccccaacca ccgttaaaag gggaagcccg |
| 301 | tgccccatca ggtccgctct tgctgagccc agagccatcc cgcgctctgc gggctgggag |
| 361 | gcccgggcca ggacgcgagt cctgcgcagc cgaggttccc cagcgccccc tgcagccgcg |
| 421 | cgtaggcaga gacggagccc ggccctgcgc ctccgcacca cgcccgggac cccacccagc |
| 481 | ggcccgtacc cggagaagca gcgcgagcac ccgaagctcc cggctggcgg cagaaaccgg |
| 541 | gagtggggcc gggcgagtgc gcggcatccc aggccggccc gaacgctccg cccgcggtgg |
| 601 | gccgacttcc cctcctcttc cctctctcct tcctttagcc cgctggcgcc ggacacgctg |
| 661 | cgcctcatct cttggggcgt tcttccccgt tggccaaccg tcgcatcccg tgcaactttg |
| 721 | gggtagtggc cgtttagtgt tgaatgttcc ccaccgagag cgcatggctt gggaagcgag |
| 781 | gcgcgaaccc ggcccccgaa gggccgccgt ccgggagacg gtgatgctgt tgctgtgcct |
| 841 | gggggtcccg accggccgcc cctacaacgt ggacactgag agcgcgctgc tttaccaggg |
| 901 | cccccacaac acgctgttcg gctactcggt cgtgctgcac agccacgggg cgaaccgatg |
| 961 | gctcctagtg ggtgcgccca ctgccaactg gctcgccaac gcttcagtga tcaatcccgg |
| 1021 | ggcgatttac agatgcagga tcggaaagaa tcccggccag acgtgcgaac agctccagct |
| 1081 | gggtagccct aatggagaac cttgtggaaa gacttgtttg gaagagagag acaatcagtg |
| 1141 | gttgggggtc acactttcca gacagccagg agaaaatgga tccatcgtga cttgtgggca |
| 1201 | tagatggaaa aatatatttt acataaagaa tgaaaataag ctccccactg gtggttgcta |
| 1261 | tggagtgccc cctgatttac gaacagaact gagtaaaaga atagctccgt gttatcaaga |
| 1321 | ttatgtgaaa aaatttggag aaaattttgc atcatgtcaa gctggaatat ccagttttta |
| 1381 | cacaaaggat ttaattgtga tgggggcccc aggatcatct tactggactg gctctctttt |
| 1441 | tgtctacaat ataactacaa ataaatacaa ggctttttta gacaaacaaa atcaagtaaa |
| 1501 | atttggaagt tatttaggat attcagtcgg agctggtcat tttcggagcc agcatactac |
| 1561 | cgaagtagtc ggaggagctc ctcaacatga gcagattggt aaggcatata tattcagcat |
| 1621 | tgatgaaaaa gaactaaata tcttacatga aatgaaaggt aaaaagcttg gatcgtactt |
| 1681 | tggagcttct gtctgtgctg tggacctcaa tgcagatggc ttctcagatc tgctcgtggg |
| 1741 | agcacccatg cagagcacca tcagagagga aggaagagtg tttgtgtaca tcaactctgg |
| 1801 | ctcgggagca gtaatgaatg caatggaaac aaacctcgtt ggaagtgaca aatatgctgc |
| 1861 | aagatttggg gaatctatag ttaatcttgg cgacattgac aatgatggct ttgaagatgt |
| 1921 | tgctatcgga gctccacaag aagatgactt gcaaggtgct atttatattt acaatggccg |
| 1981 | tgcagatggg atctcgtcaa ccttctcaca gagaattgaa ggacttcaga tcagcaaatc |
| 2041 | gttaagtatg tttggacagt ctatatcagg acaaattgat gcagataata atggctatgt |
| 2101 | agatgtagca gttggtgctt ttcggtctga ttctgctgtc ttgctaagga caagacctgt |
| 2161 | agtaattgtt gacgcttctt taagccaccc tgagtcagta aatagaacga aatttgactg |
| 2221 | tgttgaaaat ggatggcctt ctgtgtgcat agatctaaca ctttgtttct catataaggg |
| 2281 | caaggaagtt ccaggttaca ttgttttgtt ttataacatg agtttggatg tgaacagaaa |
| 2341 | ggcagagtct ccaccaagat tctatttctc ttctaatgga acttctgacg tgattacagg |
| 2401 | aagcatacag gtgtccagca gagaagctaa ctgtagaaca catcaagcat ttatgcggaa |
| 2461 | agatgtgcgg gacatcctca ccccaattca gattgaagct gcttaccacc ttggtcctca |
| 2521 | tgtcatcagt aaacgaagta cagaggaatt cccaccactt cagccaattc ttcagcagaa |
| 2581 | gaaagaaaaa gacataatga aaaaaacaat aaactttgca aggttttgtg cccatgaaaa |
| 2641 | ttgttctgct gatttacagg tttctgcaaa gattgggttt ttgaagcccc atgaaaataa |
| 2701 | aacatatctt gctgttggga gtatgaagac attgatgttg aatgtgtcct tgtttaatgc |
| 2761 | tggagatgat gcatatgaaa cgactctaca tgtcaaacta cccgtgggtc tttatttcat |
| 2821 | taagatttta gagctggaag agaagcaaat aaactgtgaa gtcacagata actctggcgt |
| 2881 | ggtacaactt gactgcagta ttggctatat atatgtagat catctctcaa ggatagatat |
| 2941 | tagctttctc ctggatgtga gctcactcag cagagcggaa gaggacctca gtatcacagt |
| 3001 | gcatgctacc tgtgaaaatg aagaggaaat ggacaatcta aagcacagca gagtgactgt |
| 3061 | agcaatacct ttaaaatatg aggttaagct gactgttcat gggtttgtaa acccaacttc |
| 3121 | atttgtgtat ggatcaaatg atgaaaatga gcctgaaacg tgcatggtgg agaaaatgaa |
| 3181 | cttaactttc catgttatca acactggcaa tagtatggct cccaatgtta gtgtggaaat |
| 3241 | aatggtacca aattctttta gcccccaaac tgataagctg ttcaacattt tggatgtcca |
| 3301 | gactactact ggagaatgcc actttgaaaa ttatcaaaga gtgtgtgcat tagagcagca |
| 3361 | aaagagtgca atgcagacct tgaaaggcat agtccggttc ttgtccaaga ctgataagag |
| 3421 | gctattgtac tgcataaaag ctgatccaca ttgtttaaat ttcttgtgta attttgggaa |
| 3481 | aatggaaagt ggaaaagaag ccagtgttca tatccaactg gaaggccggc catccatttt |
| 3541 | agaaatggat gagacttcag cactcaagtt tgaaataaga gcaacaggtt ttccagagcc |
| 3601 | aaatccaaga gtaattgaac taaacaagga tgagaatgtt gcgcatgttc tactggaagg |
| 3661 | actacatcat caaagaccca aacgttattt caccatagtg attatttcaa gtagcttgct |
| 3721 | acttggactt attgtacttc tgttgatctc atatgttatg tggaaggctg gcttctttaa |
| 3781 | aagacaatac aaatctatcc tacaagaaga aaacagaaga gacagttgga gttatatcaa |
| 3841 | cagtaaaagc aatgatgatt aaggacttct ttcaaattga gagaatggaa aacagactca |
| 3901 | ggttgtagta aagaaattta aaagacactg tttacaagaa aaaatgaatt ttgtttggac |
| 3961 | ttcttttact catgatcttg tgacatatta tgtcttcatg caaggggaaa atctcagcaa |
| 4021 | tgattactct ttgagataga agaactgcaa aggtaataat acagccaaag ataatctctc |
| 4081 | agcttttaaa tgggtagaga aacactaaag cattcaattt attcaagaaa agtaagccct |
| 4141 | tgaagatatc ttgaaatgaa agtataactg agttaaatta tactggagaa gtcttagact |
| 4201 | tgaaatacta cttaccatat gtgcttgcct cagtaaaatg aaccccactg ggtgggcaga |
| 4261 | ggttcatttc aaatacatct ttgatacttg ttcaaaatat gttctttaaa aatataattt |
| 4321 | tttagagagc tgttcccaaa ttttctaacg agtggaccat tatcacttta aagcccttta |
| 4381 | tttataatac atttcctacg ggctgtgttc caacaaccat tttttttcag cagactatga |
| 4441 | atattatagt attataggcc aaactggcaa acttcagact gaacatgtac actggtttga |
| 4501 | gcttagtgaa attacttctg gataattatt tttttataat tatggatttc accatctttc |
| 4561 | tttctgtata tatacatgtg tttttatgta ggtatatatt taccattctt cctatctatt |
| 4621 | cttcctataa cacaccttta tcaagcatac ccaggagtaa tcttcaaatc ttttgttata |
| 4681 | ttctgaaaca aaagattgtg agtgttgcac tttacctgat acacgctgat ttagaaaata |
| 4741 | cagaaaccat acctcactaa taactttaaa atcaaagctg tgcaaagact agggggccta |
| 4801 | tacttcatat gtattatgta ctatgtaaaa tattgactat cacacaacta tttccttgga |
| 4861 | tgtaattctt tgttaccctt tacaagtata agtgttacct tacatggaaa cgaagaaaca |
| 4921 | aaattcataa atttaaattc ataaatttag ctgaaagata ctgattcaat ttgtatacag |
| 4981 | tgaatataaa tgagacgaca gcaaaatttt catgaaatgt aaaatatttt tatagtttgt |
| 5041 | tcatactata tgaggttcta ttttaaatga ctttctggat tttaaaaaat ttctttaaat |
| 5101 | acaatcattt ttgtaatatt tattttatgc ttatgatcta gataattgca gaatatcatt |
| 5161 | ttatctgact ctgccttcat aagagagctg tggccgaatt ttgaacatct gttataggga |
| 5221 | gtgatcaaat tagaaggcaa tgtggaaaaa caattctggg aaagatttct ttatatgaag |
| 5281 | tccctgccac tagccagcca tcctaattga tgaaagttat ctgttcacag gcctgcagtg |
| 5341 | atggtgagga atgttctgag atttgcgaag gcatttgagt agtgaaatgt aagcacaaaa |
| 5401 | cctcctgaac ccagagtgtg tatacacagg aataaacttt atgacattta tgtattttta |
| 5461 | aaaaactttg tatcgttata aaaaggctag tcattctttc aggagaacat ctaggatcat |
| 5521 | agatgaaaaa tcaagccccg atttagaact gtcttctcca ggatggtctc taaggaaatt |
| 5581 | tacatttggt tctttcctac tcagaactac tcagaaacaa ctatatattt caggttatct |
| 5641 | gagcacagtg aaagcagagt actatggttg tccaacacag gcctctcaga tacaagggga |
| 5701 | acacaattac atattgggct agattttgcc cagttcaaaa tagtatttgt tatcaactta |
| 5761 | ctttgttact tgtatcatga attttaaaac cctaccactt taagaagaca gggatgggtt |
| 5821 | attctttttt ggcaggtagg ctatataact atgtgatttt gaaatttaac tgctctggat |
| 5881 | tagggagcag tgaatcaagg cagacttatg aaatctgtat tatatttgta acagaatata |
| 5941 | ggaaatttaa cataattgat gagctcaaat cctgaaaaat gaaagaatcc aaattatttc |
| 6001 | agaattatct aggttaaata ttgatgtatt atgatggttg caaagttttt ttgtgtgtcc |
| 6061 | aataaacaca ttgtaaaaaa aagaatttga attgatatct aaaaacagaa tttgaattga |
| 6121 | tatttcatct tgacttttaa agccctagag gctaattgtt agtaacatca atttctatta |
| 6181 | ggatatccgt ttggccacac agcaggaggt tagagcaatg gagcattact gagttcctcc |
| 6241 | ccctgtcaga tcagcagcag cattagattc tcatagaagt gcgaaccata tggtgaactg |
| 6301 | gtatgtgagg gatctagagt gccatgttcc tcaagagaat ctaatgcctg atgatctgag |
| 6361 | gtggaacagt tcatcctgaa accattcccc catccacgga aaaattgtct tccatgaaac |
| 6421 | tggtcccaaa aagggtgggg accacaggtt taaagcatgg ccacatttct ttatattaaa |
| 6481 | attctagttt gtacatttct tttagaaaca attacatgtt actttggaat catttcttcc |
| 6541 | atgcttcctc cataaagact gataagtctt ggatgcaatc tgtaaagaaa atacattatt |
| 6601 | tcatcaactt attttgttgt ttttcacata cacctaataa gtatggtaca caatgccaat |
| 6661 | gccaaataca aattgataac aaacacagca ttcccaacag agctgtaatc tagaaaactg |
| 6721 | agaaggtctg attgataaat catcaacaac aataattgct ctaaaacctc cttaactgac |
| 6781 | ttccttgatt gtccaatgct ctccattacc tctgtaaaac agtcagttat gcctctagaa |
| 6841 | cacccatgtc tagtgggcac ccctgcatgc ttcttctaac cactgagtgt cacaatgcct |
| 6901 | accaagaatg cgtttgcagg ttcctaaacc tgtttatacc agttgctatg taaaattgtt |
| 6961 | cccaagggaa gttgaatgct ctgtaaaggc ctaataaaag caaattactg aacaaaacat |
| 7021 | gttacagtaa ttatgagtga gaggaaacta agatggaagg ataaaaatct aacactttac |
| 7081 | tattcagatg gctccactaa aagatttaag atcttgatcc atttttaaaa atccaaaatg |
| 7141 | gaagttgtag acattatctg tagtttatgc acaacaataa attagaaagc caatgtagac |
| 7201 | acgcataacc aaagaaaatg ccttgggtct acataacagt tgaataaatg taaagttgct |
| 7261 | tttaaaaaaa aaaaaaaaaa a |
| Integrin α5 (NCBI Ref.: NM_002205.4; SEQ ID NO: 158) | |
| 1 | attcgcctct gggaggttta ggaagcggct ccgggtcggt ggccccagga cagggaagag |
| 61 | cgggcgctat ggggagccgg acgccagagt cccctctcca cgccgtgcag ctgcgctggg |
| 121 | gcccccggcg ccgacccccg ctgctgccgc tgctgttgct gctgctgccg ccgccaccca |
| 181 | gggtcggggg cttcaactta gacgcggagg ccccagcagt actctcgggg cccccgggct |
| 241 | ccttcttcgg attctcagtg gagttttacc ggccgggaac agacggggtc agtgtgctgg |
| 301 | tgggagcacc caaggctaat accagccagc caggagtgct gcagggtggt gctgtctacc |
| 361 | tctgtccttg gggtgccagc cccacacagt gcacccccat tgaatttgac agcaaaggct |
| 421 | ctcggctcct ggagtcctca ctgtccagct cagagggaga ggagcctgtg gagtacaagt |
| 481 | ccttgcagtg gttcggggca acagttcgag cccatggctc ctccatcttg gcatgcgctc |
| 541 | cactgtacag ctggcgcaca gagaaggagc cactgagcga ccccgtgggc acctgctacc |
| 601 | tctccacaga taacttcacc cgaattctgg agtatgcacc ctgccgctca gatttcagct |
| 661 | gggcagcagg acagggttac tgccaaggag gcttcagtgc cgagttcacc aagactggcc |
| 721 | gtgtggtttt aggtggacca ggaagctatt tctggcaagg ccagatcctg tctgccactc |
| 781 | aggagcagat tgcagaatct tattaccccg agtacctgat caacctggtt caggggcagc |
| 841 | tgcagactcg ccaggccagt tccatctatg atgacagcta cctaggatac tctgtggctg |
| 901 | ttggtgaatt cagtggtgat gacacagaag actttgttgc tggtgtgccc aaagggaacc |
| 961 | tcacttacgg ctatgtcacc atccttaatg gctcagacat tcgatccctc tacaacttct |
| 1021 | caggggaaca gatggcctcc tactttggct atgcagtggc cgccacagac gtcaatgggg |
| 1081 | acgggctgga tgacttgctg gtgggggcac ccctgctcat ggatcggacc cctgacgggc |
| 1141 | ggcctcagga ggtgggcagg gtctacgtct acctgcagca cccagccggc atagagccca |
| 1201 | cgcccaccct taccctcact ggccatgatg agtttggccg atttggcagc tccttgaccc |
| 1261 | ccctggggga cctggaccag gatggctaca atgatgtggc catcggggct ccctttggtg |
| 1321 | gggagaccca gcagggagta gtgtttgtat ttcctggggg cccaggaggg ctgggctcta |
| 1381 | agccttccca ggttctgcag cccctgtggg cagccagcca caccccagac ttctttggct |
| 1441 | ctgcccttcg aggaggccga gacctggatg gcaatggata tcctgatctg attgtggggt |
| 1501 | cctttggtgt ggacaaggct gtggtataca ggggccgccc catcgtgtcc gctagtgcct |
| 1561 | ccctcaccat cttccccgcc atgttcaacc cagaggagcg gagctgcagc ttagagggga |
| 1621 | accctgtggc ctgcatcaac cttagcttct gcctcaatgc ttctggaaaa cacgttgctg |
| 1681 | actccattgg tttcacagtg gaacttcagc tggactggca gaagcagaag ggaggggtac |
| 1741 | ggcgggcact gttcctggcc tccaggcagg caaccctgac ccagaccctg ctcatccaga |
| 1801 | atggggctcg agaggattgc agagagatga agatctacct caggaacgag tcagaatttc |
| 1861 | gagacaaact ctcgccgatt cacatcgctc tcaacttctc cttggacccc caagccccag |
| 1921 | tggacagcca cggcctcagg ccagccctac attatcagag caagagccgg atagaggaca |
| 1981 | aggctcagat cttgctggac tgtggagaag acaacatctg tgtgcctgac ctgcagctgg |
| 2041 | aagtgtttgg ggagcagaac catgtgtacc tgggtgacaa gaatgccctg aacctcactt |
| 2101 | tccatgccca gaatgtgggt gagggtggcg cctatgaggc tgagcttcgg gtcaccgccc |
| 2161 | ctccagaggc tgagtactca ggactcgtca gacacccagg gaacttctcc agcctgagct |
| 2221 | gtgactactt tgccgtgaac cagagccgcc tgctggtgtg tgacctgggc aaccccatga |
| 2281 | aggcaggagc cagtctgtgg ggtggccttc ggtttacagt ccctcatctc cgggacacta |
| 2341 | agaaaaccat ccagtttgac ttccagatcc tcagcaagaa tctcaacaac tcgcaaagcg |
| 2401 | acgtggtttc ctttcggctc tccgtggagg ctcaggccca ggtcaccctg aacggtgtct |
| 2461 | ccaagcctga ggcagtgcta ttcccagtaa gcgactggca tccccgagac cagcctcaga |
| 2521 | aggaggagga cctgggacct gctgtccacc atgtctatga gctcatcaac caaggcccca |
| 2581 | gctccattag ccagggtgtg ctggaactca gctgtcccca ggctctggaa ggtcagcagc |
| 2641 | tcctatatgt gaccagagtt acgggactca actgcaccac caatcacccc attaacccaa |
| 2701 | agggcctgga gttggatccc gagggttccc tgcaccacca gcaaaaacgg gaagctccaa |
| 2761 | gccgcagctc tgcttcctcg ggacctcaga tcctgaaatg cccggaggct gagtgtttca |
| 2821 | ggctgcgctg tgagctcggg cccctgcacc aacaagagag ccaaagtctg cagttgcatt |
| 2881 | tccgagtctg ggccaagact ttcttgcagc gggagcacca gccatttagc ctgcagtgtg |
| 2941 | aggctgtgta caaagccctg aagatgccct accgaatcct gcctcggcag ctgccccaaa |
| 3001 | aagagcgtca ggtggccaca gctgtgcaat ggaccaaggc agaaggcagc tatggcgtcc |
| 3061 | cactgtggat catcatccta gccatcctgt ttggcctcct gctcctaggt ctactcatct |
| 3121 | acatcctcta caagcttgga ttcttcaaac gctccctccc atatggcacc gccatggaaa |
| 3181 | aagctcagct caagcctcca gccacctctg atgcctgagt cctcccaatt tcagactccc |
| 3241 | attcctgaag aaccagtccc cccaccctca ttctactgaa aaggaggggt ctgggtactt |
| 3301 | cttgaaggtg ctgacggcca gggagaagct cctctcccca gcccagagac atacttgaag |
| 3361 | ggccagagcc aggggggtga ggagctgggg atccctcccc cccatgcact gtgaaggacc |
| 3421 | cttgtttaca cataccctct tcatggatgg gggaactcag atccagggac agaggcccca |
| 3481 | gcctccctga agcctttgca ttttggagag tttcctgaaa caacttggaa agataactag |
| 3541 | gaaatccatt cacagttctt tgggccagac atgccacaag gacttcctgt ccagctccaa |
| 3601 | cctgcaaaga tctgtcctca gccttgccag agatccaaaa gaagccccca gctaagaacc |
| 3661 | tggaacttgg ggagttaaga cctggcagct ctggacagcc ccaccctggt gggccaacaa |
| 3721 | agaacactaa ctatgcatgg tgccccagga ccagctcagg acagatgcca cacaaggata |
| 3781 | gatgctggcc cagggcccag agcccagctc caaggggaat cagaactcaa atggggccag |
| 3841 | atccagcctg gggtctggag ttgatctgga acccagactc agacattggc acctaatcca |
| 3901 | ggcagatcca ggactatatt tgggcctgct ccagacctga tcctggaggc ccagttcacc |
| 3961 | ctgatttagg agaagccagg aatttcccag gaccctgaag gggccatgat ggcaacagat |
| 4021 | ctggaacctc agcctggcca gacacaggcc ctccctgttc cccagagaaa ggggagccca |
| 4081 | ctgtcctggg cctgcagaat ttgggttctg cctgccagct gcactgatgc tgcccctcat |
| 4141 | ctctctgccc aacccttccc tcaccttggc accagacacc caggacttat ttaaactctg |
| 4201 | ttgcaagtgc aataaatctg acccagtgcc cccactgacc agaactagaa aaaaaaaaaa |
| 4261 | aaaaaaa |
| Integrin β1 (NCBI Ref.: NM_002211.3; SEQ ID NO: 159) | |
| 1 | atcagacgcg cagaggaggc ggggccgcgg ctggtttcct gccggggggc ggctctgggc |
| 61 | cgccgagtcc cctcctcccg cccctgagga ggaggagccg ccgccacccg ccgcgcccga |
| 121 | cacccgggag gccccgccag cccgcgggag aggcccagcg ggagtcgcgg aacagcaggc |
| 181 | ccgagcccac cgcgccgggc cccggacgcc gcgcggaaaa gatgaattta caaccaattt |
| 241 | tctggattgg actgatcagt tcagtttgct gtgtgtttgc tcaaacagat gaaaatagat |
| 301 | gtttaaaagc aaatgccaaa tcatgtggag aatgtataca agcagggcca aattgtgggt |
| 361 | ggtgcacaaa ttcaacattt ttacaggaag gaatgcctac ttctgcacga tgtgatgatt |
| 421 | tagaagcctt aaaaaagaag ggttgccctc cagatgacat agaaaatccc agaggctcca |
| 481 | aagatataaa gaaaaataaa aatgtaacca accgtagcaa aggaacagca gagaagctca |
| 541 | agccagagga tattactcag atccaaccac agcagttggt tttgcgatta agatcagggg |
| 601 | agccacagac atttacatta aaattcaaga gagctgaaga ctatcccatt gacctctact |
| 661 | accttatgga cctgtcttac tcaatgaaag acgatttgga gaatgtaaaa agtcttggaa |
| 721 | cagatctgat gaatgaaatg aggaggatta cttcggactt cagaattgga tttggctcat |
| 781 | ttgtggaaaa gactgtgatg ccttacatta gcacaacacc agctaagctc aggaaccctt |
| 841 | gcacaagtga acagaactgc accagcccat ttagctacaa aaatgtgctc agtcttacta |
| 901 | ataaaggaga agtatttaat gaacttgttg gaaaacagcg catatctgga aatttggatt |
| 961 | ctccagaagg tggtttcgat gccatcatgc aagttgcagt ttgtggatca ctgattggct |
| 1021 | ggaggaatgt tacacggctg ctggtgtttt ccacagatgc cgggtttcac tttgctggag |
| 1081 | atgggaaact tggtggcatt gttttaccaa atgatggaca atgtcacctg gaaaataata |
| 1141 | tgtacacaat gagccattat tatgattatc cttctattgc tcaccttgtc cagaaactga |
| 1201 | gtgaaaataa tattcagaca atttttgcag ttactgaaga atttcagcct gtttacaagg |
| 1261 | agctgaaaaa cttgatccct aagtcagcag taggaacatt atctgcaaat tctagcaatg |
| 1321 | taattcagtt gatcattgat gcatacaatt ccctttcctc agaagtcatt ttggaaaacg |
| 1381 | gcaaattgtc agaaggcgta acaataagtt acaaatctta ctgcaagaac ggggtgaatg |
| 1441 | gaacagggga aaatggaaga aaatgttcca atatttccat tggagatgag gttcaatttg |
| 1501 | aaattagcat aacttcaaat aagtgtccaa aaaaggattc tgacagcttt aaaattaggc |
| 1561 | ctctgggctt tacggaggaa gtagaggtta ttcttcagta catctgtgaa tgtgaatgcc |
| 1621 | aaagcgaagg catccctgaa agtcccaagt gtcatgaagg aaatgggaca tttgagtgtg |
| 1681 | gcgcgtgcag gtgcaatgaa gggcgtgttg gtagacattg tgaatgcagc acagatgaag |
| 1741 | ttaacagtga agacatggat gcttactgca ggaaagaaaa cagttcagaa atctgcagta |
| 1801 | acaatggaga gtgcgtctgc ggacagtgtg tttgtaggaa gagggataat acaaatgaaa |
| 1861 | tttattctgg caaattctgc gagtgtgata atttcaactg tgatagatcc aatggcttaa |
| 1921 | tttgtggagg aaatggtgtt tgcaagtgtc gtgtgtgtga gtgcaacccc aactacactg |
| 1981 | gcagtgcatg tgactgttct ttggatacta gtacttgtga agccagcaac ggacagatct |
| 2041 | gcaatggccg gggcatctgc gagtgtggtg tctgtaagtg tacagatccg aagtttcaag |
| 2101 | ggcaaacgtg tgagatgtgt cagacctgcc ttggtgtctg tgctgagcat aaagaatgtg |
| 2161 | ttcagtgcag agccttcaat aaaggagaaa agaaagacac atgcacacag gaatgttcct |
| 2221 | attttaacat taccaaggta gaaagtcggg acaaattacc ccagccggtc caacctgatc |
| 2281 | ctgtgtccca ttgtaaggag aaggatgttg acgactgttg gttctatttt acgtattcag |
| 2341 | tgaatgggaa caacgaggtc atggttcatg ttgtggagaa tccagagtgt cccactggtc |
| 2401 | cagacatcat tccaattgta gctggtgtgg ttgctggaat tgttcttatt ggccttgcat |
| 2461 | tactgctgat atggaagctt ttaatgataa ttcatgacag aagggagttt gctaaatttg |
| 2521 | aaaaggagaa aatgaatgcc aaatgggaca cgggtgaaaa tcctatttat aagagtgccg |
| 2581 | taacaactgt ggtcaatccg aagtatgagg gaaaatgagt actgcccgtg caaatcccac |
| 2641 | aacactgaat gcaaagtagc aatttccata gtcacagtta ggtagcttta gggcaatatt |
| 2701 | gccatggttt tactcatgtg caggttttga aaatgtacaa tatgtataat ttttaaaatg |
| 2761 | ttttattatt ttgaaaataa tgttgtaatt catgccaggg actgacaaaa gacttgagac |
| 2821 | aggatggtta ctcttgtcag ctaaggtcac attgtgcctt tttgaccttt tcttcctgga |
| 2881 | ctattgaaat caagcttatt ggattaagtg atatttctat agcgattgaa agggcaatag |
| 2941 | ttaaagtaat gagcatgatg agagtttctg ttaatcatgt attaaaactg atttttagct |
| 3001 | ttacaaatat gtcagtttgc agttatgcag aatccaaagt aaatgtcctg ctagctagtt |
| 3061 | aaggattgtt ttaaatctgt tattttgcta tttgcctgtt agacatgact gatgacatat |
| 3121 | ctgaaagaca agtatgttga gagttgctgg tgtaaaatac gtttgaaata gttgatctac |
| 3181 | aaaggccatg ggaaaaattc agagagttag gaaggaaaaa ccaatagctt taaaacctgt |
| 3241 | gtgccatttt aagagttact taatgtttgg taacttttat gccttcactt tacaaattca |
| 3301 | agccttagat aaaagaaccg agcaattttc tgctaaaaag tccttgattt agcactattt |
| 3361 | acatacaggc catactttac aaagtatttg ctgaatgggg accttttgag ttgaatttat |
| 3421 | tttattattt ttattttgtt taatgtctgg tgctttctgt cacctcttct aatcttttaa |
| 3481 | tgtatttgtt tgcaattttg gggtaagact ttttttatga gtactttttc tttgaagttt |
| 3541 | tagcggtcaa tttgcctttt taatgaacat gtgaagttat actgtggcta tgcaacagct |
| 3601 | ctcacctacg cgagtcttac tttgagttag tgccataaca gaccactgta tgtttacttc |
| 3661 | tcaccatttg agttgcccat cttgtttcac actagtcaca ttcttgtttt aagtgccttt |
| 3721 | agttttaaca gttcactttt tacagtgcta tttactgaag ttatttatta aatatgccta |
| 3781 | aaatacttaa atcggatgtc ttgactctga tgtattttat caggttgtgt gcatgaaatt |
| 3841 | tttatagatt aaagaagttg aggaaaagca aaaaaaaaa |
| Integrin β3 (NCBI Ref.: NM_000212.2; SEQ ID NO: 160) | |
| 1 | cgccgcggga ggcggacgag atgcgagcgc ggccgcggcc ccggccgctc tgggcgactg |
| 61 | tgctggcgct gggggcgctg gcgggcgttg gcgtaggagg gcccaacatc tgtaccacgc |
| 121 | gaggtgtgag ctcctgccag cagtgcctgg ctgtgagccc catgtgtgcc tggtgctctg |
| 181 | atgaggccct gcctctgggc tcacctcgct gtgacctgaa ggagaatctg ctgaaggata |
| 241 | actgtgcccc agaatccatc gagttcccag tgagtgaggc ccgagtacta gaggacaggc |
| 301 | ccctcagcga caagggctct ggagacagct cccaggtcac tcaagtcagt ccccagagga |
| 361 | ttgcactccg gctccggcca gatgattcga agaatttctc catccaagtg cggcaggtgg |
| 421 | aggattaccc tgtggacatc tactacttga tggacctgtc ttactccatg aaggatgatc |
| 481 | tgtggagcat ccagaacctg ggtaccaagc tggccaccca gatgcgaaag ctcaccagta |
| 541 | acctgcggat tggcttcggg gcatttgtgg acaagcctgt gtcaccatac atgtatatct |
| 601 | ccccaccaga ggccctcgaa aacccctgct atgatatgaa gaccacctgc ttgcccatgt |
| 661 | ttggctacaa acacgtgctg acgctaactg accaggtgac ccgcttcaat gaggaagtga |
| 721 | agaagcagag tgtgtcacgg aaccgagatg ccccagaggg tggctttgat gccatcatgc |
| 781 | aggctacagt ctgtgatgaa aagattggct ggaggaatga tgcatcccac ttgctggtgt |
| 841 | ttaccactga tgccaagact catatagcat tggacggaag gctggcaggc attgtccagc |
| 901 | ctaatgacgg gcagtgtcat gttggtagtg acaatcatta ctctgcctcc actaccatgg |
| 961 | attatccctc tttggggctg atgactgaga agctatccca gaaaaacatc aatttgatct |
| 1021 | ttgcagtgac tgaaaatgta gtcaatctct atcagaacta tagtgagctc atcccaggga |
| 1081 | ccacagttgg ggttctgtcc atggattcca gcaatgtcct ccagctcatt gttgatgctt |
| 1141 | atgggaaaat ccgttctaaa gtagagctgg aagtgcgtga cctccctgaa gagttgtctc |
| 1201 | tatccttcaa tgccacctgc ctcaacaatg aggtcatccc tggcctcaag tcttgtatgg |
| 1261 | gactcaagat tggagacacg gtgagcttca gcattgaggc caaggtgcga ggctgtcccc |
| 1321 | aggagaagga gaagtccttt accataaagc ccgtgggctt caaggacagc ctgatcgtcc |
| 1381 | aggtcacctt tgattgtgac tgtgcctgcc aggcccaagc tgaacctaat agccatcgct |
| 1441 | gcaacaatgg caatgggacc tttgagtgtg gggtatgccg ttgtgggcct ggctggctgg |
| 1501 | gatcccagtg tgagtgctca gaggaggact atcgcccttc ccagcaggac gaatgcagcc |
| 1561 | cccgggaggg tcagcccgtc tgcagccagc ggggcgagtg cctctgtggt caatgtgtct |
| 1621 | gccacagcag tgactttggc aagatcacgg gcaagtactg cgagtgtgac gacttctcct |
| 1681 | gtgtccgcta caagggggag atgtgctcag gccatggcca gtgcagctgt ggggactgcc |
| 1741 | tgtgtgactc cgactggacc ggctactact gcaactgtac cacgcgtact gacacctgca |
| 1801 | tgtccagcaa tgggctgctg tgcagcggcc gcggcaagtg tgaatgtggc agctgtgtct |
| 1861 | gtatccagcc gggctcctat ggggacacct gtgagaagtg ccccacctgc ccagatgcct |
| 1921 | gcacctttaa gaaagaatgt gtggagtgta agaagtttga ccggggagcc ctacatgacg |
| 1981 | aaaatacctg caaccgttac tgccgtgacg agattgagtc agtgaaagag cttaaggaca |
| 2041 | ctggcaagga tgcagtgaat tgtacctata agaatgagga tgactgtgtc gtcagattcc |
| 2101 | agtactatga agattctagt ggaaagtcca tcctgtatgt ggtagaagag ccagagtgtc |
| 2161 | ccaagggccc tgacatcctg gtggtcctgc tctcagtgat gggggccatt ctgctcattg |
| 2221 | gccttgccgc cctgctcatc tggaaactcc tcatcaccat ccacgaccga aaagaattcg |
| 2281 | ctaaatttga ggaagaacgc gccagagcaa aatgggacac agccaacaac ccactgtata |
| 2341 | aagaggccac gtctaccttc accaatatca cgtaccgggg cacttaatga taagcagtca |
| 2401 | tcctcagatc attatcagcc tgtgccacga ttgcaggagt ccctgccatc atgtttacag |
| 2461 | aggacagtat ttgtggggag ggatttgggg ctcagagtgg ggtaggttgg gagaatgtca |
| 2521 | gtatgtggaa gtgtgggtct gtgtgtgtgt atgtgggggt ctgtgtgttt atgtgtgtgt |
| 2581 | gttgtgtgtg ggagtgtgta atttaaaatt gtgatgtgtc ctgataagct gagctcctta |
| 2641 | gcctttgtcc cagaatgcct cctgcaggga ttcttcctgc ttagcttgag ggtgactatg |
| 2701 | gagctgagca ggtgttcttc attacctcag tgagaagcca gctttcctca tcaggccatt |
| 2761 | gtccctgaag agaagggcag ggctgaggcc tctcattcca gaggaaggga caccaagcct |
| 2821 | tggctctacc ctgagttcat aaatttatgg ttctcaggcc tgactctcag cagctatggt |
| 2881 | aggaactgct gggcttggca gcccgggtca tctgtacctc tgcctccttt cccctccctc |
| 2941 | aggccgaagg aggagtcagg gagagctgaa ctattagagc tgcctgtgcc ttttgccatc |
| 3001 | ccctcaaccc agctatggtt ctctcgcaag ggaagtcctt gcaagctaat tctttgacct |
| 3061 | gttgggagtg aggatgtctg ggccactcag gggtcattca tggcctgggg gatgtaccag |
| 3121 | catctcccag ttcataatca caacccttca gatttgcctt attggcagct ctactctgga |
| 3181 | ggtttgttta gaagaagtgt gtcaccctta ggccagcacc atctctttac ctcctaattc |
| 3241 | cacaccctca ctgctgtaga catttgctat gagctgggga tgtctctcat gaccaaatgc |
| 3301 | ttttcctcaa agggagagag tgctattgta gagccagagg tctggcccta tgcttccggc |
| 3361 | ctcctgtccc tcatccatag cacctccaca tacctggccc tgtgccttgg tgtgctgtat |
| 3421 | ccatccatgg ggctgattgt atttaccttc tacctcttgg ctgccttgtg aaggaattat |
| 3481 | tcccatgagt tggctgggaa taagtgccag gatggaatga tgggtcagtt gtatcagcac |
| 3541 | gtgtggcctg ttcttctatg ggttggacaa cctcatttta actcagtctt taatctgaga |
| 3601 | ggccacagtg caattttatt ttatttttct catgatgagg ttttcttaac ttaaaagaac |
| 3661 | atgtatataa acatgcttgc attatatttg taaatttatg tgatggcaaa gaaggagagc |
| 3721 | ataggaaacc acacagactt gggcagggta cagacactcc cacttggcat cattcacagc |
| 3781 | aagtcactgg ccagtggctg gatctgtgag gggctctctc atgatagaag gctatgggga |
| 3841 | tagatgtgtg gacacattgg acctttcctg aggaagaggg actgttcttt tgtcccagaa |
| 3901 | aagcagtggc tccattggtg ttgacataca tccaacatta aaagccaccc ccaaatgccc |
| 3961 | aagaaaaaaa gaaagactta tcaacatttg ttccatgagc agaaaactgg agctctggcc |
| 4021 | tcagtgttac agctaaataa tctttaatta aggcaagtca ctttcttctt cttaaagctg |
| 4081 | ttttctagtt tgagaaatga tgggatttta gcagccagtc ttgaaggtct ctttcagtat |
| 4141 | caacattcta agatgctggg acttactgtg tcatcaaatg tgcggttaag attctctggg |
| 4201 | atattgatac tgtttgtgtt tttagttggg agatctgaga gacctggctt tggcaagagc |
| 4261 | agatgtcatt ccatatcacc tttctcaatg aaagtctcat tctatcctct ctccaaaccc |
| 4321 | gttttccaac atttgttaat agttacgtct ctcctgatgt agcacttaag cttcatttag |
| 4381 | ttattatttc tttcttcact ttgcacacat ttgcatccac atattaggga agaggaatcc |
| 4441 | ataagtagct gaaatatcta ttctgtatta ttgtgttaac attgagaata agccttggaa |
| 4501 | ttagatatgg ggcaatgact gagccctgtc tcacccatgg attactcctt actgtaggga |
| 4561 | atggcagtat ggtagaggga taaatagggg gcggggaggg atagtcatgg atccaagaag |
| 4621 | tccttagaaa tagtggcagg gaacaggtgt ggaagctcat gcctgtaatt ataaccttca |
| 4681 | gctactaaga caggtgtggt ggctcacgcc tgtgattata atcttcagtt actaagacag |
| 4741 | agtccatgag agtgttaatg ggacattttc tttagataag atgttttata tgaagaaact |
| 4801 | gtatcaaagg gggaagaaaa tgtatttaac aggtgaatca aatcaggaat cttgtctgag |
| 4861 | ctactggaat gaagttcaca ggtcttgaag acca |
| Integrin β5 (NCBI Ref.: NM_002213.4; SEQ ID NO: 161) | |
| 1 | gccgccgagc ggagccagcc cctcccctac ccggagcagc ccgctggggc cgtcccgagc |
| 61 | ggcgacacac taggagtccc ggccggccag ccagggcagc cgcggtcccg ggactcggcc |
| 121 | gtgagtgctg cgggacggat ggtggcggcg gggcgcgggc cagcgcgggc gccgtgagcc |
| 181 | ggagctgcgc gcggggcatg cggctgcggc ccccggccct cggcccccgc gctccggccc |
| 241 | cagccccggc cgccggcccc cgcggagtgc agcgaccgcg ccgccgctga gggaggcgcc |
| 301 | ccaccatgcc gcgggccccg gcgccgctgt acgcctgcct cctggggctc tgcgcgctcc |
| 361 | tgccccggct cgcaggtctc aacatatgca ctagtggaag tgccacctca tgtgaagaat |
| 421 | gtctgctaat ccacccaaaa tgtgcctggt gctccaaaga ggacttcgga agcccacggt |
| 481 | ccatcacctc tcggtgtgat ctgagggcaa accttgtcaa aaatggctgt ggaggtgaga |
| 541 | tagagagccc agccagcagc ttccatgtcc tgaggagcct gcccctcagc agcaagggtt |
| 601 | cgggctctgc aggctgggac gtcattcaga tgacaccaca ggagattgcc gtgaacctcc |
| 661 | ggcccggtga caagaccacc ttccagctac aggttcgcca ggtggaggac tatcctgtgg |
| 721 | acctgtacta cctgatggac ctctccctgt ccatgaagga tgacttggac aatatccgga |
| 781 | gcctgggcac caaactcgcg gaggagatga ggaagctcac cagcaacttc cggttgggat |
| 841 | ttgggtcttt tgttgataag gacatctctc ctttctccta cacggcaccg aggtaccaga |
| 901 | ccaatccgtg cattggttac aagttgtttc caaattgcgt cccctccttt gggttccgcc |
| 961 | atctgctgcc tctcacagac agagtggaca gcttcaatga ggaagttcgg aaacagaggg |
| 1021 | tgtcccggaa ccgagatgcc cctgaggggg gctttgatgc agtactccag gcagccgtct |
| 1081 | gcaaggagaa gattggctgg cgaaaggatg cactgcattt gctggtgttc acaacagatg |
| 1141 | atgtgcccca catcgcattg gatggaaaat tgggaggcct ggtgcagcca cacgatggcc |
| 1201 | agtgccacct gaacgaggcc aacgagtaca ctgcatccaa ccagatggac tatccatccc |
| 1261 | ttgccttgct tggagagaaa ttggcagaga acaacatcaa cctcatcttt gcagtgacaa |
| 1321 | aaaaccatta tatgctgtac aagaatttta cagccctgat acctggaaca acggtggaga |
| 1381 | ttttagatgg agactccaaa aatattattc aactgattat taatgcatac aatagtatcc |
| 1441 | ggtctaaagt ggagttgtca gtctgggatc agcctgagga tcttaatctc ttctttactg |
| 1501 | ctacctgcca agatggggta tcctatcctg gtcagaggaa gtgtgagggt ctgaagattg |
| 1561 | gggacacggc atcttttgaa gtatcattgg aggcccgaag ctgtcccagc agacacacgg |
| 1621 | agcatgtgtt tgccctgcgg ccggtgggat tccgggacag cctggaggtg ggggtcacct |
| 1681 | acaactgcac gtgcggctgc agcgtggggc tggaacccaa cagcgccagg tgcaacggga |
| 1741 | gcgggaccta tgtctgcggc ctgtgtgagt gcagccccgg ctacctgggc accaggtgcg |
| 1801 | agtgccagga tggggagaac cagagcgtgt accagaacct gtgccgggag gcagagggca |
| 1861 | agccactgtg cagcgggcgt ggggactgca gctgcaacca gtgctcctgc ttcgagagcg |
| 1921 | agtttggcaa gatctatggg cctttctgtg agtgcgacaa cttctcctgt gccaggaaca |
| 1981 | agggagtcct ctgctcaggc catggcgagt gtcactgcgg ggaatgcaag tgccatgcag |
| 2041 | gttacatcgg ggacaactgt aactgctcga cagacatcag cacatgccgg ggcagagatg |
| 2101 | gccagatctg cagcgagcgt gggcactgtc tctgtgggca gtgccaatgc acggagccgg |
| 2161 | gggcctttgg ggagatgtgt gagaagtgcc ccacctgccc ggatgcatgc agcaccaaga |
| 2221 | gagattgcgt cgagtgcctg ctgctccact ctgggaaacc tgacaaccag acctgccaca |
| 2281 | gcctatgcag ggatgaggtg atcacatggg tggacaccat cgtgaaagat gaccaggagg |
| 2341 | ctgtgctatg tttctacaaa accgccaagg actgcgtcat gatgttcacc tatgtggagc |
| 2401 | tccccagtgg gaagtccaac ctgaccgtcc tcagggagcc agagtgtgga aacaccccca |
| 2461 | acgccatgac catcctcctg gctgtggtcg gtagcatcct ccttgttggg cttgcactcc |
| 2521 | tggctatctg gaagctgctt gtcaccatcc acgaccggag ggagtttgca aagtttcaga |
| 2581 | gcgagcgatc cagggcccgc tatgaaatgg cttcaaatcc attatacaga aagcctatct |
| 2641 | ccacgcacac tgtggacttc accttcaaca agttcaacaa atcctacaat ggcactgtgg |
| 2701 | actgatgttt ccttctccga ggggctggag cggggatctg atgaaaaggt cagactgaaa |
| 2761 | cgccttgcac ggctgctcgg cttgatcaca gctccctagg taggcaccac agagaagacc |
| 2821 | ttctagtgag cctgggccag gagcccacag tgcctgtaca ggaaggtgcc tggccatgtc |
| 2881 | acctggctgc taggccagag ccatgccagg ctgcgtccct ccgagcttgg gataaagcaa |
| 2941 | ggggaccttg gcgctctcag ctttccctgc cacatccagc ttgttgtccc aatgaaatac |
| 3001 | tgagatgctg ggctgtctct cccttccagg aatgctgggc ccccagcctg gccagacaag |
| 3061 | aagactgtca ggaagggtcg gagtctgtaa aaccagcata cagtttggct tttttcacat |
| 3121 | tgatcatttt tatatgaaat aaaaagatcc tgcatttatg gtgtagttct gagtcctgag |
| 3181 | acttttctgc gtgatggcta tgccttgcac acaggtgttg gtgatggggc tgttgagatg |
| 3241 | cctgttgaag gtacatcgtt tgcaaatgtc agtttcctct cctgtccgtg tttgtttagt |
| 3301 | acttttataa tgaaaagaaa caagattgtt tgggattgga agtaaagatt aaaaccaaaa |
| 3361 | gaatttgtgt ttgtctgata ctctctgtgt gtttctttct ttctgagcgg acttaaaatg |
| 3421 | gtgcccccag tggggattga agcggccgtg tacttcctca gggatgggac acaggctggt |
| 3481 | ctgatactcc agactgcagc ttgtcaagta agcatgaggt gctcggggca gtgagggctg |
| 3541 | tgcaaggggg aacactgagc agataccttt ggccccttcc agcttttact gacagagagt |
| 3601 | tccaggctag acaccataaa aaccacccct tgttctgagg ggctgaggct ggaaatagat |
| 3661 | tgtacagaca agcaagggtt gagtggtggt tcccacacga agtcatctct taatcatcat |
| 3721 | tagcaatagc agttcccttc caaggcctcc cctcactccc gaaacactta cgtcccatgc |
| 3781 | aggcccaatg caaaaaaaca catttgagct tttttcccgc agggccatga agtcccctta |
| 3841 | agttcccata tctaagatgg ttgactgacc ctctcccctt atgtacagaa gaggaaactg |
| 3901 | attctcagag aggggaagtg gcttgcccga gtgtttgtta ggaggttact gaatgacaaa |
| 3961 | ctgttcctaa gaccccatct catgctggcc agagggccag cctcctcatt cctgcttgct |
| 4021 | cttagaaaat ctttcactga tcattttttg tcactggaat aacttcaagg ttattatgct |
| 4081 | ttcattccaa atggatctgt cctcagctct ggacccaatt ccccttactt cattttggca |
| 4141 | aacactaagt caaatagtga aatgcctgtc actacataga acctattacc tggggcaaat |
| 4201 | acgaacagat tgagtttcct tcatcttgtg taaatatgat gaaacagaga cctggtaact |
| 4261 | tggtgacact gttaaaccct ttttgggata aagccaaatg taaatgaaaa cattaaacag |
| 4321 | ataaattgtg gtgttgagac ttttctgaat tgagaaaaat aaatgtaatt ttggaagaaa |
| 4381 | aaaaaaaaaa aa |
| Integrin β7 (NCBI Ref.: NM_000889.2; SEQ ID NO: 162) | |
| 1 | aaatcttccc caccctgggg agtgtcactt cctcctctgc cgtctcccag atcagtacac |
| 61 | aaaggctgct gctgccgcca gaggaaggac tgctctgcac gcacctatgt ggaaactaaa |
| 121 | gcccagagag aaagtctgac ttgccccaca gccagtgagt gactgcagca gcaccagaat |
| 181 | ctggtctgtt tcctgtttgg ctcttctacc actacggctt gggatctcgg gcatggtggc |
| 241 | tttgccaatg gtccttgttt tgctgctggt cctgagcaga ggtgagagtg aattggacgc |
| 301 | caagatccca tccacagggg atgccacaga atggcggaat cctcacctgt ccatgctggg |
| 361 | gtcctgccag ccagccccct cctgccagaa gtgcatcctc tcacacccca gctgtgcatg |
| 421 | gtgcaagcaa ctgaacttca ccgcgtcggg agaggcggag gcgcggcgct gcgcccgacg |
| 481 | agaggagctg ctggctcgag gctgcccgct ggaggagctg gaggagcccc gcggccagca |
| 541 | ggaggtgctg caggaccagc cgctcagcca gggcgcccgc ggagagggtg ccacccagct |
| 601 | ggcgccgcag cgggtccggg tcacgctgcg gcctggggag ccccagcagc tccaggtccg |
| 661 | cttccttcgt gctgagggat acccggtgga cctgtactac cttatggacc tgagctactc |
| 721 | catgaaggac gacctggaac gcgtgcgcca gctcgggcac gctctgctgg tccggctgca |
| 781 | ggaagtcacc cattctgtgc gcattggttt tggttccttt gtggacaaaa cggtgctgcc |
| 841 | ctttgtgagc acagtaccct ccaaactgcg ccacccctgc cccacccggc tggagcgctg |
| 901 | ccagtcacca ttcagctttc accatgtgct gtccctgacg ggggacgcac aagccttcga |
| 961 | gcgggaggtg gggcgccaga gtgtgtccgg caatctggac tcgcctgaag gtggcttcga |
| 1021 | tgccattctg caggctgcac tctgccagga gcagattggc tggagaaatg tgtcccggct |
| 1081 | gctggtgttc acttcagacg acacattcca tacagctggg gacgggaagt tgggcggcat |
| 1141 | tttcatgccc agtgatgggc actgccactt ggacagcaat ggcctctaca gtcgcagcac |
| 1201 | agagtttgac tacccttctg tgggtcaggt agcccaggcc ctctctgcag caaatatcca |
| 1261 | gcccatcttt gctgtcacca gtgccgcact gcctgtctac caggagctga gtaaactgat |
| 1321 | tcctaagtct gcagttgggg agctgagtga ggactccagc aacgtggtac agctcatcat |
| 1381 | ggatgcttat aatagcctgt cttccaccgt gacccttgaa cactcttcac tccctcctgg |
| 1441 | ggtccacatt tcttacgaat cccagtgtga gggtcctgag aagagggagg gtaaggctga |
| 1501 | ggatcgagga cagtgcaacc acgtccgaat caaccagacg gtgactttct gggtttctct |
| 1561 | ccaagccacc cactgcctcc cagagcccca tctcctgagg ctccgggccc ttggcttctc |
| 1621 | agaggagctg attgtggagt tgcacacgct gtgtgactgt aattgcagtg acacccagcc |
| 1681 | ccaggctccc cactgcagtg atggccaggg acacctacaa tgtggtgtat gcagctgtgc |
| 1741 | ccctggccgc ctaggtcggc tctgtgagtg ctctgtggca gagctgtcct ccccagacct |
| 1801 | ggaatctggg tgccgggctc ccaatggcac agggcccctg tgcagtggaa agggtcactg |
| 1861 | tcaatgtgga cgctgcagct gcagtggaca gagctctggg catctgtgcg agtgtgacga |
| 1921 | tgccagctgt gagcgacatg agggcatcct ctgcggaggc tttggtcgct gccaatgtgg |
| 1981 | agtatgtcac tgtcatgcca accgcacggg cagagcatgc gaatgcagtg gggacatgga |
| 2041 | cagttgcatc agtcccgagg gagggctctg cagtgggcat ggacgctgca aatgcaaccg |
| 2101 | ctgccagtgc ttggacggct actatggtgc tctatgcgac caatgcccag gctgcaagac |
| 2161 | accatgcgag agacaccggg actgtgcaga gtgtggggcc ttcaggactg gcccactggc |
| 2221 | caccaactgc agtacagctt gtgcccatac caatgtgacc ctggccttgg cccctatctt |
| 2281 | ggatgatggc tggtgcaaag agcggaccct ggacaaccag ctgttcttct tcttggtgga |
| 2341 | ggatgacgcc agaggcacgg tcgtgctcag agtgagaccc caagaaaagg gagcagacca |
| 2401 | cacgcaggcc attgtgctgg gctgcgtagg gggcatcgtg gcagtggggc tggggctggt |
| 2461 | cctggcttac cggctctcgg tggaaatcta tgaccgccgg gaatacagtc gctttgagaa |
| 2521 | ggagcagcaa caactcaact ggaagcagga cagtaatcct ctctacaaaa gtgccatcac |
| 2581 | gaccaccatc aatcctcgct ttcaagaggc agacagtccc actctctgaa ggagggaggg |
| 2641 | acacttaccc aaggctcttc tccttggagg acagtgggaa ctggagggtg agaggaaggg |
| 2701 | tgggtctgta agaccttggt aggggactaa ttcactggcg aggtgcggcc accaccctac |
| 2761 | ttcattttca gagtgacacc caagagggct gcttcccatg cctgcaacct tgcatccatc |
| 2821 | tgggctaccc cacccaagta tacaataaag tcttacctca gaccacaaaa aaaaaaaa |
| E-selectin (NCBI Ref.: NM_000450.2; SEQ ID NO: 163) | |
| 1 | agctgttctt ggctgacttc acatcaaaac tcctatactg acctgagaca gaggcagcag |
| 61 | tgatacccac ctgagagatc ctgtgtttga acaactgctt cccaaaacgg aaagtatttc |
| 121 | aagcctaaac ctttgggtga aaagaactct tgaagtcatg attgcttcac agtttctctc |
| 181 | agctctcact ttggtgcttc tcattaaaga gagtggagcc tggtcttaca acacctccac |
| 241 | ggaagctatg acttatgatg aggccagtgc ttattgtcag caaaggtaca cacacctggt |
| 301 | tgcaattcaa aacaaagaag agattgagta cctaaactcc atattgagct attcaccaag |
| 361 | ttattactgg attggaatca gaaaagtcaa caatgtgtgg gtctgggtag gaacccagaa |
| 421 | acctctgaca gaagaagcca agaactgggc tccaggtgaa cccaacaata ggcaaaaaga |
| 481 | tgaggactgc gtggagatct acatcaagag agaaaaagat gtgggcatgt ggaatgatga |
| 541 | gaggtgcagc aagaagaagc ttgccctatg ctacacagct gcctgtacca atacatcctg |
| 601 | cagtggccac ggtgaatgtg tagagaccat caataattac acttgcaagt gtgaccctgg |
| 661 | cttcagtgga ctcaagtgtg agcaaattgt gaactgtaca gccctggaat cccctgagca |
| 721 | tggaagcctg gtttgcagtc acccactggg aaacttcagc tacaattctt cctgctctat |
| 781 | cagctgtgat aggggttacc tgccaagcag catggagacc atgcagtgta tgtcctctgg |
| 841 | agaatggagt gctcctattc cagcctgcaa tgtggttgag tgtgatgctg tgacaaatcc |
| 901 | agccaatggg ttcgtggaat gtttccaaaa ccctggaagc ttcccatgga acacaacctg |
| 961 | tacatttgac tgtgaagaag gatttgaact aatgggagcc cagagccttc agtgtacctc |
| 1021 | atctgggaat tgggacaacg agaagccaac gtgtaaagct gtgacatgca gggccgtccg |
| 1081 | ccagcctcag aatggctctg tgaggtgcag ccattcccct gctggagagt tcaccttcaa |
| 1141 | atcatcctgc aacttcacct gtgaggaagg cttcatgttg cagggaccag cccaggttga |
| 1201 | atgcaccact caagggcagt ggacacagca aatcccagtt tgtgaagctt tccagtgcac |
| 1261 | agccttgtcc aaccccgagc gaggctacat gaattgtctt cctagtgctt ctggcagttt |
| 1321 | ccgttatggg tccagctgtg agttctcctg tgagcagggt tttgtgttga agggatccaa |
| 1381 | aaggctccaa tgtggcccca caggggagtg ggacaacgag aagcccacat gtgaagctgt |
| 1441 | gagatgcgat gctgtccacc agcccccgaa gggtttggtg aggtgtgctc attcccctat |
| 1501 | tggagaattc acctacaagt cctcttgtgc cttcagctgt gaggagggat ttgaattaca |
| 1561 | tggatcaact caacttgagt gcacatctca gggacaatgg acagaagagg ttccttcctg |
| 1621 | ccaagtggta aaatgttcaa gcctggcagt tccgggaaag atcaacatga gctgcagtgg |
| 1681 | ggagcccgtg tttggcactg tgtgcaagtt cgcctgtcct gaaggatgga cgctcaatgg |
| 1741 | ctctgcagct cggacatgtg gagccacagg acactggtct ggcctgctac ctacctgtga |
| 1801 | agctcccact gagtccaaca ttcccttggt agctggactt tctgctgctg gactctccct |
| 1861 | cctgacatta gcaccatttc tcctctggct tcggaaatgc ttacggaaag caaagaaatt |
| 1921 | tgttcctgcc agcagctgcc aaagccttga atcagatgga agctaccaaa agccttctta |
| 1981 | catcctttaa gttcaaaaga atcagaaaca ggtgcatctg gggaactaga gggatacact |
| 2041 | gaagttaaca gagacagata actctcctcg ggtctctggc ccttcttgcc tactatgcca |
| 2101 | gatgccttta tggctgaaac cgcaacaccc atcaccactt caatagatca aagtccagca |
| 2161 | ggcaaggacg gccttcaact gaaaagactc agtgttccct ttcctactct caggatcaag |
| 2221 | aaagtgttgg ctaatgaagg gaaaggatat tttcttccaa gcaaaggtga agagaccaag |
| 2281 | actctgaaat ctcagaattc cttttctaac tctcccttgc tcgctgtaaa atcttggcac |
| 2341 | agaaacacaa tattttgtgg ctttctttct tttgcccttc acagtgtttc gacagctgat |
| 2401 | tacacagttg ctgtcataag aatgaataat aattatccag agtttagagg aaaaaaatga |
| 2461 | ctaaaaatat tataacttaa aaaaatgaca gatgttgaat gcccacaggc aaatgcatgg |
| 2521 | agggttgtta atggtgcaaa tcctactgaa tgctctgtgc gagggttact atgcacaatt |
| 2581 | taatcacttt catccctatg ggattcagtg cttcttaaag agttcttaag gattgtgata |
| 2641 | tttttacttg cattgaatat attataatct tccatacttc ttcattcaat acaagtgtgg |
| 2701 | tagggactta aaaaacttgt aaatgctgtc aactatgata tggtaaaagt tacttattct |
| 2761 | agattacccc ctcattgttt attaacaaat tatgttacat ctgttttaaa tttatttcaa |
| 2821 | aaagggaaac tattgtcccc tagcaaggca tgatgttaac cagaataaag ttctgagtgt |
| 2881 | ttttactaca gttgtttttt gaaaacatgg tagaattgga gagtaaaaac tgaatggaag |
| 2941 | gtttgtatat tgtcagatat tttttcagaa atatgtggtt tccacgatga aaaacttcca |
| 3001 | tgaggccaaa cgttttgaac taataaaagc ataaatgcaa acacacaaag gtataatttt |
| 3061 | atgaatgtct ttgttggaaa agaatacaga aagatggatg tgctttgcat tcctacaaag |
| 3121 | atgtttgtca gatatgatat gtaaacataa ttcttgtata ttatggaaga ttttaaattc |
| 3181 | acaatagaaa ctcaccatgt aaaagagtca tctggtagat ttttaacgaa tgaagatgtc |
| 3241 | taatagttat tccctatttg ttttcttctg tatgttaggg tgctctggaa gagaggaatg |
| 3301 | cctgtgtgag caagcattta tgtttattta taagcagatt taacaattcc aaaggaatct |
| 3361 | ccagttttca gttgatcact ggcaatgaaa aattctcagt cagtaattgc caaagctgct |
| 3421 | ctagccttga ggagtgtgag aatcaaaact ctcctacact tccattaact tagcatgtgt |
| 3481 | tgaaaaaaaa gtttcagaga agttctggct gaacactggc aacaacaaag ccaacagtca |
| 3541 | aaacagagat gtgataagga tcagaacagc agaggttctt ttaaaggggc agaaaaactc |
| 3601 | tgggaaataa gagagaacaa ctactgtgat caggctatgt atggaataca gtgttatttt |
| 3661 | ctttgaaatt gtttaagtgt tgtaaatatt tatgtaaact gcattagaaa ttagctgtgt |
| 3721 | gaaataccag tgtggtttgt gtttgagttt tattgagaat tttaaattat aacttaaaat |
| 3781 | attttataat ttttaaagta tatatttatt taagcttatg tcagacctat ttgacataac |
| 3841 | actataaagg ttgacaataa atgtgcttat gttta |
| ICAM-1 (NCBI Ref.: NM_000201.2; SEQ ID NO: 164) | |
| 1 | caagcttagc ctggccggga aacgggaggc gtggaggccg ggagcagccc ccggggtcat |
| 61 | cgccctgcca ccgccgcccg attgctttag cttggaaatt ccggagctga agcggccagc |
| 121 | gagggaggat gaccctctcg gcccgggcac cctgtcagtc cggaaataac tgcagcattt |
| 181 | gttccggagg ggaaggcgcg aggtttccgg gaaagcagca ccgccccttg gcccccaggt |
| 241 | ggctagcgct ataaaggatc acgcgcccca gtcgacgctg agctcctctg ctactcagag |
| 301 | ttgcaacctc agcctcgcta tggctcccag cagcccccgg cccgcgctgc ccgcactcct |
| 361 | ggtcctgctc ggggctctgt tcccaggacc tggcaatgcc cagacatctg tgtccccctc |
| 421 | aaaagtcatc ctgccccggg gaggctccgt gctggtgaca tgcagcacct cctgtgacca |
| 481 | gcccaagttg ttgggcatag agaccccgtt gcctaaaaag gagttgctcc tgcctgggaa |
| 541 | caaccggaag gtgtatgaac tgagcaatgt gcaagaagat agccaaccaa tgtgctattc |
| 601 | aaactgccct gatgggcagt caacagctaa aaccttcctc accgtgtact ggactccaga |
| 661 | acgggtggaa ctggcacccc tcccctcttg gcagccagtg ggcaagaacc ttaccctacg |
| 721 | ctgccaggtg gagggtgggg caccccgggc caacctcacc gtggtgctgc tccgtgggga |
| 781 | gaaggagctg aaacgggagc cagctgtggg ggagcccgct gaggtcacga ccacggtgct |
| 841 | ggtgaggaga gatcaccatg gagccaattt ctcgtgccgc actgaactgg acctgcggcc |
| 901 | ccaagggctg gagctgtttg agaacacctc ggccccctac cagctccaga cctttgtcct |
| 961 | gccagcgact cccccacaac ttgtcagccc ccgggtccta gaggtggaca cgcaggggac |
| 1021 | cgtggtctgt tccctggacg ggctgttccc agtctcggag gcccaggtcc acctggcact |
| 1081 | gggggaccag aggttgaacc ccacagtcac ctatggcaac gactccttct cggccaaggc |
| 1141 | ctcagtcagt gtgaccgcag aggacgaggg cacccagcgg ctgacgtgtg cagtaatact |
| 1201 | ggggaaccag agccaggaga cactgcagac agtgaccatc tacagctttc cggcgcccaa |
| 1261 | cgtgattctg acgaagccag aggtctcaga agggaccgag gtgacagtga agtgtgaggc |
| 1321 | ccaccctaga gccaaggtga cgctgaatgg ggttccagcc cagccactgg gcccgagggc |
| 1381 | ccagctcctg ctgaaggcca ccccagagga caacgggcgc agcttctcct gctctgcaac |
| 1441 | cctggaggtg gccggccagc ttatacacaa gaaccagacc cgggagcttc gtgtcctgta |
| 1501 | tggcccccga ctggacgaga gggattgtcc gggaaactgg acgtggccag aaaattccca |
| 1561 | gcagactcca atgtgccagg cttgggggaa cccattgccc gagctcaagt gtctaaagga |
| 1621 | tggcactttc ccactgccca tcggggaatc agtgactgtc actcgagatc ttgagggcac |
| 1681 | ctacctctgt cgggccagga gcactcaagg ggaggtcacc cgcaaggtga ccgtgaatgt |
| 1741 | gctctccccc cggtatgaga ttgtcatcat cactgtggta gcagccgcag tcataatggg |
| 1801 | cactgcaggc ctcagcacgt acctctataa ccgccagcgg aagatcaaga aatacagact |
| 1861 | acaacaggcc caaaaaggga cccccatgaa accgaacaca caagccacgc ctccctgaac |
| 1921 | ctatcccggg acagggcctc ttcctcggcc ttcccatatt ggtggcagtg gtgccacact |
| 1981 | gaacagagtg gaagacatat gccatgcagc tacacctacc ggccctggga cgccggagga |
| 2041 | cagggcattg tcctcagtca gatacaacag catttggggc catggtacct gcacacctaa |
| 2101 | aacactaggc cacgcatctg atctgtagtc acatgactaa gccaagagga aggagcaaga |
| 2161 | ctcaagacat gattgatgga tgttaaagtc tagcctgatg agaggggaag tggtggggga |
| 2221 | gacatagccc caccatgagg acatacaact gggaaatact gaaacttgct gcctattggg |
| 2281 | tatgctgagg ccccacagac ttacagaaga agtggccctc catagacatg tgtagcatca |
| 2341 | aaacacaaag gcccacactt cctgacggat gccagcttgg gcactgctgt ctactgaccc |
| 2401 | caacccttga tgatatgtat ttattcattt gttattttac cagctattta ttgagtgtct |
| 2461 | tttatgtagg ctaaatgaac ataggtctct ggcctcacgg agctcccagt cctaatcaca |
| 2521 | ttcaaggtca ccaggtacag ttgtacaggt tgtacactgc aggagagtgc ctggcaaaaa |
| 2581 | gatcaaatgg ggctgggact tctcattggc caacctgcct ttccccagaa ggagtgattt |
| 2641 | ttctatcggc acaaaagcac tatatggact ggtaatggtt acaggttcag agattaccca |
| 2701 | gtgaggcctt attcctccct tccccccaaa actgacacct ttgttagcca cctccccacc |
| 2761 | cacatacatt tctgccagtg ttcacaatga cactcagcgg tcatgtctgg acatgagtgc |
| 2821 | ccagggaata tgcccaagct atgccttgtc ctcttgtcct gtttgcattt cactgggagc |
| 2881 | ttgcactatg cagctccagt ttcctgcagt gatcagggtc ctgcaagcag tggggaaggg |
| 2941 | ggccaaggta ttggaggact ccctcccagc tttggaagcc tcatccgcgt gtgtgtgtgt |
| 3001 | gtgtatgtgt agacaagctc tcgctctgtc acccaggctg gagtgcagtg gtgcaatcat |
| 3061 | ggttcactgc agtcttgacc ttttgggctc aagtgatcct cccacctcag cctcctgagt |
| 3121 | agctgggacc ataggctcac aacaccacac ctggcaaatt tgattttttt tttttttcca |
| 3181 | gagacggggt ctcgcaacat tgcccagact tcctttgtgt tagttaataa agctttctca |
| 3241 | actgccaaa |
| TGF-β (NCBI Ref.: NM_000660.6; SEQ ID NO: 165) | |
| 1 | acctccctcc gcggagcagc cagacagcga gggccccggc cgggggcagg ggggacgccc |
| 61 | cgtccggggc acccccccgg ctctgagccg cccgcggggc cggcctcggc ccggagcgga |
| 121 | ggaaggagtc gccgaggagc agcctgaggc cccagagtct gagacgagcc gccgccgccc |
| 181 | ccgccactgc ggggaggagg gggaggagga gcgggaggag ggacgagctg gtcgggagaa |
| 241 | gaggaaaaaa acttttgaga cttttccgtt gccgctggga gccggaggcg cggggacctc |
| 301 | ttggcgcgac gctgccccgc gaggaggcag gacttgggga ccccagaccg cctccctttg |
| 361 | ccgccgggga cgcttgctcc ctccctgccc cctacacggc gtccctcagg cgcccccatt |
| 421 | ccggaccagc cctcgggagt cgccgacccg gcctcccgca aagacttttc cccagacctc |
| 481 | gggcgcaccc cctgcacgcc gccttcatcc ccggcctgtc tcctgagccc ccgcgcatcc |
| 541 | tagacccttt ctcctccagg agacggatct ctctccgacc tgccacagat cccctattca |
| 601 | agaccaccca ccttctggta ccagatcgcg cccatctagg ttatttccgt gggatactga |
| 661 | gacacccccg gtccaagcct cccctccacc actgcgccct tctccctgag gacctcagct |
| 721 | ttccctcgag gccctcctac cttttgccgg gagaccccca gcccctgcag gggcggggcc |
| 781 | tccccaccac accagccctg ttcgcgctct cggcagtgcc ggggggcgcc gcctccccca |
| 841 | tgccgccctc cgggctgcgg ctgctgccgc tgctgctacc gctgctgtgg ctactggtgc |
| 901 | tgacgcctgg ccggccggcc gcgggactat ccacctgcaa gactatcgac atggagctgg |
| 961 | tgaagcggaa gcgcatcgag gccatccgcg gccagatcct gtccaagctg cggctcgcca |
| 1021 | gccccccgag ccagggggag gtgccgcccg gcccgctgcc cgaggccgtg ctcgccctgt |
| 1081 | acaacagcac ccgcgaccgg gtggccgggg agagtgcaga accggagccc gagcctgagg |
| 1141 | ccgactacta cgccaaggag gtcacccgcg tgctaatggt ggaaacccac aacgaaatct |
| 1201 | atgacaagtt caagcagagt acacacagca tatatatgtt cttcaacaca tcagagctcc |
| 1261 | gagaagcggt acctgaaccc gtgttgctct cccgggcaga gctgcgtctg ctgaggctca |
| 1321 | agttaaaagt ggagcagcac gtggagctgt accagaaata cagcaacaat tcctggcgat |
| 1381 | acctcagcaa ccggctgctg gcacccagcg actcgccaga gtggttatct tttgatgtca |
| 1441 | ccggagttgt gcggcagtgg ttgagccgtg gaggggaaat tgagggcttt cgccttagcg |
| 1501 | cccactgctc ctgtgacagc agggataaca cactgcaagt ggacatcaac gggttcacta |
| 1561 | ccggccgccg aggtgacctg gccaccattc atggcatgaa ccggcctttc ctgcttctca |
| 1621 | tggccacccc gctggagagg gcccagcatc tgcaaagctc ccggcaccgc cgagccctgg |
| 1681 | acaccaacta ttgcttcagc tccacggaga agaactgctg cgtgcggcag ctgtacattg |
| 1741 | acttccgcaa ggacctcggc tggaagtgga tccacgagcc caagggctac catgccaact |
| 1801 | tctgcctcgg gccctgcccc tacatttgga gcctggacac gcagtacagc aaggtcctgg |
| 1861 | ccctgtacaa ccagcataac ccgggcgcct cggcggcgcc gtgctgcgtg ccgcaggcgc |
| 1921 | tggagccgct gcccatcgtg tactacgtgg gccgcaagcc caaggtggag cagctgtcca |
| 1981 | acatgatcgt gcgctcctgc aagtgcagct gaggtcccgc cccgccccgc cccgccccgg |
| 2041 | caggcccggc cccaccccgc cccgcccccg ctgccttgcc catgggggct gtatttaagg |
| 2101 | acacccgtgc cccaagccca cctggggccc cattaaagat ggagagagga ctgcggatct |
| 2161 | ctgtgtcatt gggcgcctgc ctggggtctc catccctgac gttcccccac tcccactccc |
| 2221 | tctctctccc tctctgcctc ctcctgcctg tctgcactat tcctttgccc ggcatcaagg |
| 2281 | cacaggggac cagtggggaa cactactgta gttagatcta tttattgagc accttgggca |
| 2341 | ctgttgaagt gccttacatt aatgaactca ttcagtcacc atagcaacac tctgagatgc |
| 2401 | agggactctg ataacaccca ttttaaaggt gaggaaacaa gcccagagag gttaagggag |
| 2461 | gagttcctgc ccaccaggaa cctgctttag tgggggatag tgaagaagac aataaaagat |
| 2521 | agtagttcag gccaggcggg gtggctcacg cctgtaatcc tagcactttt gggaggcaga |
| 2581 | gatgggagga ttacttgaat ccaggcattt gagaccagcc tgggtaacat agtgagaccc |
| 2641 | tatctctaca aaacactttt aaaaaatgta cacctgtggt cccagctact ctggaggcta |
| 2701 | aggtgggagg atcacttgat cctgggaggt caaggctgca g |
| MadCAM-1 (NCBI Ref.: NM_130760.2; SEQ ID NO: 166) | |
| 1 | gggactgagc atggatttcg gactggccct cctgctggcg gggcttctgg ggctcctcct |
| 61 | cggccagtcc ctccaggtga agcccctgca ggtggagccc ccggagccgg tggtggccgt |
| 121 | ggccttgggc gcctcgcgcc agctcacctg ccgcctggcc tgcgcggacc gcggggcctc |
| 181 | ggtgcagtgg cggggcctgg acaccagcct gggcgcggtg cagtcggaca cgggccgcag |
| 241 | cgtcctcacc gtgcgcaacg cctcgctgtc ggcggccggg acccgcgtgt gcgtgggctc |
| 301 | ctgcgggggc cgcaccttcc agcacaccgt gcagctcctt gtgtacgcct tcccggacca |
| 361 | gctgaccgtc tccccagcag ccctggtgcc tggtgacccg gaggtggcct gtacggccca |
| 421 | caaagtcacg cccgtggacc ccaacgcgct ctccttctcc ctgctcgtcg ggggccagga |
| 481 | actggagggg gcgcaagccc tgggcccgga ggtgcaggag gaggaggagg agccccaggg |
| 541 | ggacgaggac gtgctgttca gggtgacaga gcgctggcgg ctgccgcccc tggggacccc |
| 601 | tgtcccgccc gccctctact gccaggccac gatgaggctg cctggcttgg agctcagcca |
| 661 | ccgccaggcc atccccgtcc tgcacagccc gacctccccg gagcctcccg acaccacctc |
| 721 | cccggagtct cccgacacca cctccccgga gtctcccgac accacctccc aggagcctcc |
| 781 | cgacaccacc tccccggagc ctcccgacaa gacctccccg gagcccgccc cccagcaggg |
| 841 | ctccacacac acccccagga gcccaggctc caccaggact cgccgccctg agatctccca |
| 901 | ggctgggccc acgcagggag aagtgatccc aacaggctcg tccaaacctg cgggtgacca |
| 961 | gctgcccgcg gctctgtgga ccagcagtgc ggtgctggga ctgctgctcc tggccttgcc |
| 1021 | cacctatcac ctctggaaac gctgccggca cctggctgag gacgacaccc acccaccagc |
| 1081 | ttctctgagg cttctgcccc aggtgtcggc ctgggctggg ttaaggggga ccggccaggt |
| 1141 | cgggatcagc ccctcctgag tggccagcct ttccccctgt gaaagcaaaa tagcttggac |
| 1201 | cccttcaagt tgagaactgg tcagggcaaa cctgcctccc attctactca aagtcatccc |
| 1261 | tctgttcaca gagatggatg catgttctga ttgcctcttt ggagaagctc atcagaaact |
| 1321 | caaaagaagg ccactgtttg tctcacctac ccatgacctg aagcccctcc ctgagtggtc |
| 1381 | cccacctttc tggacggaac cacgtacttt ttacatacat tgattcatgt ctcacgtctc |
| 1441 | cctaaaaatg cgtaagacca agctgtgccc tgaccaccct gggcccctgt cgtcaggacc |
| 1501 | tcctgaggct ttggcaaata aacctcctaa aatgataaaa aaaaaa |
| VCAM-1 (NCBI Ref.: NM_001078.3; SEQ ID NO: 167) | |
| 1 | aaactttttt ccctggctct gccctgggtt tccccttgaa gggatttccc tccgcctctg |
| 61 | caacaagacc ctttataaag cacagacttt ctatttcact ccgcggtatc tgcatcgggc |
| 121 | ctcactggct tcaggagctg aataccctcc caggcacaca caggtgggac acaaataagg |
| 181 | gttttggaac cactattttc tcatcacgac agcaacttaa aatgcctggg aagatggtcg |
| 241 | tgatccttgg agcctcaaat atactttgga taatgtttgc agcttctcaa gcttttaaaa |
| 301 | tcgagaccac cccagaatct agatatcttg ctcagattgg tgactccgtc tcattgactt |
| 361 | gcagcaccac aggctgtgag tccccatttt tctcttggag aacccagata gatagtccac |
| 421 | tgaatgggaa ggtgacgaat gaggggacca catctacgct gacaatgaat cctgttagtt |
| 481 | ttgggaacga acactcttac ctgtgcacag caacttgtga atctaggaaa ttggaaaaag |
| 541 | gaatccaggt ggagatctac tcttttccta aggatccaga gattcatttg agtggccctc |
| 601 | tggaggctgg gaagccgatc acagtcaagt gttcagttgc tgatgtatac ccatttgaca |
| 661 | ggctggagat agacttactg aaaggagatc atctcatgaa gagtcaggaa tttctggagg |
| 721 | atgcagacag gaagtccctg gaaaccaaga gtttggaagt aacctttact cctgtcattg |
| 781 | aggatattgg aaaagttctt gtttgccgag ctaaattaca cattgatgaa atggattctg |
| 841 | tgcccacagt aaggcaggct gtaaaagaat tgcaagtcta catatcaccc aagaatacag |
| 901 | ttatttctgt gaatccatcc acaaagctgc aagaaggtgg ctctgtgacc atgacctgtt |
| 961 | ccagcgaggg tctaccagct ccagagattt tctggagtaa gaaattagat aatgggaatc |
| 1021 | tacagcacct ttctggaaat gcaactctca ccttaattgc tatgaggatg gaagattctg |
| 1081 | gaatttatgt gtgtgaagga gttaatttga ttgggaaaaa cagaaaagag gtggaattaa |
| 1141 | ttgttcaaga gaaaccattt actgttgaga tctcccctgg accccggatt gctgctcaga |
| 1201 | ttggagactc agtcatgttg acatgtagtg tcatgggctg tgaatcccca tctttctcct |
| 1261 | ggagaaccca gatagacagc cctctgagcg ggaaggtgag gagtgagggg accaattcca |
| 1321 | cgctgaccct gagccctgtg agttttgaga acgaacactc ttatctgtgc acagtgactt |
| 1381 | gtggacataa gaaactggaa aagggaatcc aggtggagct ctactcattc cctagagatc |
| 1441 | cagaaatcga gatgagtggt ggcctcgtga atgggagctc tgtcactgta agctgcaagg |
| 1501 | ttcctagcgt gtaccccctt gaccggctgg agattgaatt acttaagggg gagactattc |
| 1561 | tggagaatat agagtttttg gaggatacgg atatgaaatc tctagagaac aaaagtttgg |
| 1621 | aaatgacctt catccctacc attgaagata ctggaaaagc tcttgtttgt caggctaagt |
| 1681 | tacatattga tgacatggaa ttcgaaccca aacaaaggca gagtacgcaa acactttatg |
| 1741 | tcaatgttgc ccccagagat acaaccgtct tggtcagccc ttcctccatc ctggaggaag |
| 1801 | gcagttctgt gaatatgaca tgcttgagcc agggctttcc tgctccgaaa atcctgtgga |
| 1861 | gcaggcagct ccctaacggg gagctacagc ctctttctga gaatgcaact ctcaccttaa |
| 1921 | tttctacaaa aatggaagat tctggggttt atttatgtga aggaattaac caggctggaa |
| 1981 | gaagcagaaa ggaagtggaa ttaattatcc aagttactcc aaaagacata aaacttacag |
| 2041 | cttttccttc tgagagtgtc aaagaaggag acactgtcat catctcttgt acatgtggaa |
| 2101 | atgttccaga aacatggata atcctgaaga aaaaagcgga gacaggagac acagtactaa |
| 2161 | aatctataga tggcgcctat accatccgaa aggcccagtt gaaggatgcg ggagtatatg |
| 2221 | aatgtgaatc taaaaacaaa gttggctcac aattaagaag tttaacactt gatgttcaag |
| 2281 | gaagagaaaa caacaaagac tatttttctc ctgagcttct cgtgctctat tttgcatcct |
| 2341 | ccttaataat acctgccatt ggaatgataa tttactttgc aagaaaagcc aacatgaagg |
| 2401 | ggtcatatag tcttgtagaa gcacagaagt caaaagtgta gctaatgctt gatatgttca |
| 2461 | actggagaca ctatttatct gtgcaaatcc ttgatactgc tcatcattcc ttgagaaaaa |
| 2521 | caatgagctg agaggcagac ttccctgaat gtattgaact tggaaagaaa tgcccatcta |
| 2581 | tgtcccttgc tgtgagcaag aagtcaaagt aaaacttgct gcctgaagaa cagtaactgc |
| 2641 | catcaagatg agagaactgg aggagttcct tgatctgtat atacaataac ataatttgta |
| 2701 | catatgtaaa ataaaattat gccatagcaa gattgcttaa aatagcaaca ctctatattt |
| 2761 | agattgttaa aataactagt gttgcttgga ctattataat ttaatgcatg ttaggaaaat |
| 2821 | ttcacattaa tatttgctga cagctgacct ttgtcatctt tcttctattt tattcccttt |
| 2881 | cacaaaattt tattcctata tagtttattg acaataattt caggttttgt aaagatgccg |
| 2941 | ggttttatat ttttatagac aaataataag caaagggagc actgggttga ctttcaggta |
| 3001 | ctaaatacct caacctatgg tataatggtt gactgggttt ctctgtatag tactggcatg |
| 3061 | gtacggagat gtttcacgaa gtttgttcat cagactcctg tgcaactttc ccaatgtggc |
| 3121 | ctaaaaatgc aacttctttt tattttcttt tgtaaatgtt taggtttttt tgtatagtaa |
| 3181 | agtgataatt tctggaatta gaaaaaaaaa aaaaaaaaaa |
| Fibronectin (NCBI Ref.: NM_001306129.1; SEQ ID NO: 168) | |
| 1 | acgcccgcgc cggctgtgct gcacaggggg aggagaggga accccaggcg cgagcgggaa |
| 61 | gaggggacct gcagccacaa cttctctggt cctctgcatc ccttctgtcc ctccacccgt |
| 121 | ccccttcccc accctctggc ccccaccttc ttggaggcga caacccccgg gaggcattag |
| 181 | aagggatttt tcccgcaggt tgcgaaggga agcaaacttg gtggcaactt gcctcccggt |
| 241 | gcgggcgtct ctcccccacc gtctcaacat gcttaggggt ccggggcccg ggctgctgct |
| 301 | gctggccgtc cagtgcctgg ggacagcggt gccctccacg ggagcctcga agagcaagag |
| 361 | gcaggctcag caaatggttc agccccagtc cccggtggct gtcagtcaaa gcaagcccgg |
| 421 | ttgttatgac aatggaaaac actatcagat aaatcaacag tgggagcgga cctacctagg |
| 481 | caatgcgttg gtttgtactt gttatggagg aagccgaggt tttaactgcg agagtaaacc |
| 541 | tgaagctgaa gagacttgct ttgacaagta cactgggaac acttaccgag tgggtgacac |
| 601 | ttatgagcgt cctaaagact ccatgatctg ggactgtacc tgcatcgggg ctgggcgagg |
| 661 | gagaataagc tgtaccatcg caaaccgctg ccatgaaggg ggtcagtcct acaagattgg |
| 721 | tgacacctgg aggagaccac atgagactgg tggttacatg ttagagtgtg tgtgtcttgg |
| 781 | taatggaaaa ggagaatgga cctgcaagcc catagctgag aagtgttttg atcatgctgc |
| 841 | tgggacttcc tatgtggtcg gagaaacgtg ggagaagccc taccaaggct ggatgatggt |
| 901 | agattgtact tgcctgggag aaggcagcgg acgcatcact tgcacttcta gaaatagatg |
| 961 | caacgatcag gacacaagga catcctatag aattggagac acctggagca agaaggataa |
| 1021 | tcgaggaaac ctgctccagt gcatctgcac aggcaacggc cgaggagagt ggaagtgtga |
| 1081 | gaggcacacc tctgtgcaga ccacatcgag cggatctggc cccttcaccg atgttcgtgc |
| 1141 | agctgtttac caaccgcagc ctcaccccca gcctcctccc tatggccact gtgtcacaga |
| 1201 | cagtggtgtg gtctactctg tggggatgca gtggctgaag acacaaggaa ataagcaaat |
| 1261 | gctttgcacg tgcctgggca acggagtcag ctgccaagag acagctgtaa cccagactta |
| 1321 | cggtggcaac tcaaatggag agccatgtgt cttaccattc acctacaatg gcaggacgtt |
| 1381 | ctactcctgc accacagaag ggcgacagga cggacatctt tggtgcagca caacttcgaa |
| 1441 | ttatgagcag gaccagaaat actctttctg cacagaccac actgttttgg ttcagactcg |
| 1501 | aggaggaaat tccaatggtg ccttgtgcca cttccccttc ctatacaaca accacaatta |
| 1561 | cactgattgc acttctgagg gcagaagaga caacatgaag tggtgtggga ccacacagaa |
| 1621 | ctatgatgcc gaccagaagt ttgggttctg ccccatggct gcccacgagg aaatctgcac |
| 1681 | aaccaatgaa ggggtcatgt accgcattgg agatcagtgg gataagcagc atgacatggg |
| 1741 | tcacatgatg aggtgcacgt gtgttgggaa tggtcgtggg gaatggacat gcattgccta |
| 1801 | ctcgcagctt cgagatcagt gcattgttga tgacatcact tacaatgtga acgacacatt |
| 1861 | ccacaagcgt catgaagagg ggcacatgct gaactgtaca tgcttcggtc agggtcgggg |
| 1921 | caggtggaag tgtgatcccg tcgaccaatg ccaggattca gagactggga cgttttatca |
| 1981 | aattggagat tcatgggaga agtatgtgca tggtgtcaga taccagtgct actgctatgg |
| 2041 | ccgtggcatt ggggagtggc attgccaacc tttacagacc tatccaagct caagtggtcc |
| 2101 | tgtcgaagta tttatcactg agactccgag tcagcccaac tcccacccca tccagtggaa |
| 2161 | tgcaccacag ccatctcaca tttccaagta cattctcagg tggagaccta aaaattctgt |
| 2221 | aggccgttgg aaggaagcta ccataccagg ccacttaaac tcctacacca tcaaaggcct |
| 2281 | gaagcctggt gtggtatacg agggccagct catcagcatc cagcagtacg gccaccaaga |
| 2341 | agtgactcgc tttgacttca ccaccaccag caccagcaca cctgtgacca gcaacaccgt |
| 2401 | gacaggagag acgactccct tttctcctct tgtggccact tctgaatctg tgaccgaaat |
| 2461 | cacagccagt agctttgtgg tctcctgggt ctcagcttcc gacaccgtgt cgggattccg |
| 2521 | ggtggaatat gagctgagtg aggagggaga tgagccacag tacctggatc ttccaagcac |
| 2581 | agccacttct gtgaacatcc ctgacctgct tcctggccga aaatacattg taaatgtcta |
| 2641 | tcagatatct gaggatgggg agcagagttt gatcctgtct acttcacaaa caacagcgcc |
| 2701 | tgatgcccct cctgacccga ctgtggacca agttgatgac acctcaattg ttgttcgctg |
| 2761 | gagcagaccc caggctccca tcacagggta cagaatagtc tattcgccat cagtagaagg |
| 2821 | tagcagcaca gaactcaacc ttcctgaaac tgcaaactcc gtcaccctca gtgacttgca |
| 2881 | acctggtgtt cagtataaca tcactatcta tgctgtggaa gaaaatcaag aaagtacacc |
| 2941 | tgttgtcatt caacaagaaa ccactggcac cccacgctca gatacagtgc cctctcccag |
| 3001 | ggacctgcag tttgtggaag tgacagacgt gaaggtcacc atcatgtgga caccgcctga |
| 3061 | gagtgcagtg accggctacc gtgtggatgt gatccccgtc aacctgcctg gcgagcacgg |
| 3121 | gcagaggctg cccatcagca ggaacacctt tgcagaagtc accgggctgt cccctggggt |
| 3181 | cacctattac ttcaaagtct ttgcagtgag ccatgggagg gagagcaagc ctctgactgc |
| 3241 | tcaacagaca accaaactgg atgctcccac taacctccag tttgtcaatg aaactgattc |
| 3301 | tactgtcctg gtgagatgga ctccacctcg ggcccagata acaggatacc gactgaccgt |
| 3361 | gggccttacc cgaagaggac agcccaggca gtacaatgtg ggtccctctg tctccaagta |
| 3421 | cccactgagg aatctgcagc ctgcatctga gtacaccgta tccctcgtgg ccataaaggg |
| 3481 | caaccaagag agccccaaag ccactggagt ctttaccaca ctgcagcctg ggagctctat |
| 3541 | tccaccttac aacaccgagg tgactgagac caccattgtg atcacatgga cgcctgctcc |
| 3601 | aagaattggt tttaagctgg gtgtacgacc aagccaggga ggagaggcac cacgagaagt |
| 3661 | gacttcagac tcaggaagca tcgttgtgtc cggcttgact ccaggagtag aatacgtcta |
| 3721 | caccatccaa gtcctgagag atggacagga aagagatgcg ccaattgtaa acaaagtggt |
| 3781 | gacaccattg tctccaccaa caaacttgca tctggaggca aaccctgaca ctggagtgct |
| 3841 | cacagtctcc tgggagagga gcaccacccc agacattact ggttatagaa ttaccacaac |
| 3901 | ccctacaaac ggccagcagg gaaattcttt ggaagaagtg gtccatgctg atcagagctc |
| 3961 | ctgcactttt gataacctga gtcccggcct ggagtacaat gtcagtgttt acactgtcaa |
| 4021 | ggatgacaag gaaagtgtcc ctatctctga taccatcatc ccagaggtgc cccaactcac |
| 4081 | tgacctaagc tttgttgata taaccgattc aagcatcggc ctgaggtgga ccccgctaaa |
| 4141 | ctcttccacc attattgggt accgcatcac agtagttgcg gcaggagaag gtatccctat |
| 4201 | ttttgaagat tttgtggact cctcagtagg atactacaca gtcacagggc tggagccggg |
| 4261 | cattgactat gatatcagcg ttatcactct cattaatggc ggcgagagtg cccctactac |
| 4321 | actgacacaa caaacggctg ttcctcctcc cactgacctg cgattcacca acattggtcc |
| 4381 | agacaccatg cgtgtcacct gggctccacc cccatccatt gatttaacca acttcctggt |
| 4441 | gcgttactca cctgtgaaaa atgaggaaga tgttgcagag ttgtcaattt ctccttcaga |
| 4501 | caatgcagtg gtcttaacaa atctcctgcc tggtacagaa tatgtagtga gtgtctccag |
| 4561 | tgtctacgaa caacatgaga gcacacctct tagaggaaga cagaaaacag gtcttgattc |
| 4621 | cccaactggc attgactttt ctgatattac tgccaactct tttactgtgc actggattgc |
| 4681 | tcctcgagcc accatcactg gctacaggat ccgccatcat cccgagcact tcagtgggag |
| 4741 | acctcgagaa gatcgggtgc cccactctcg gaattccatc accctcacca acctcactcc |
| 4801 | aggcacagag tatgtggtca gcatcgttgc tcttaatggc agagaggaaa gtcccttatt |
| 4861 | gattggccaa caatcaacag tttctgatgt tccgagggac ctggaagttg ttgctgcgac |
| 4921 | ccccaccagc ctactgatca gctgggatgc tcctgctgtc acagtgagat attacaggat |
| 4981 | cacttacgga gagacaggag gaaatagccc tgtccaggag ttcactgtgc ctgggagcaa |
| 5041 | gtctacagct accatcagcg gccttaaacc tggagttgat tataccatca ctgtgtatgc |
| 5101 | tgtcactggc cgtggagaca gccccgcaag cagcaagcca atttccatta attaccgaac |
| 5161 | agaaattgac aaaccatccc agatgcaagt gaccgatgtt caggacaaca gcattagtgt |
| 5221 | caagtggctg ccttcaagtt cccctgttac tggttacaga gtaaccacca ctcccaaaaa |
| 5281 | tggaccagga ccaacaaaaa ctaaaactgc aggtccagat caaacagaaa tgactattga |
| 5341 | aggcttgcag cccacagtgg agtatgtggt tagtgtctat gctcagaatc caagcggaga |
| 5401 | gagtcagcct ctggttcaga ctgcagtaac caacattgat cgccctaaag gactggcatt |
| 5461 | cactgatgtg gatgtcgatt ccatcaaaat tgcttgggaa agcccacagg ggcaagtttc |
| 5521 | caggtacagg gtgacctact cgagccctga ggatggaatc catgagctat tccctgcacc |
| 5581 | tgatggtgaa gaagacactg cagagctgca aggcctcaga ccgggttctg agtacacagt |
| 5641 | cagtgtggtt gccttgcacg atgatatgga gagccagccc ctgattggaa cccagtccac |
| 5701 | agctattcct gcaccaactg acctgaagtt cactcaggtc acacccacaa gcctgagcgc |
| 5761 | ccagtggaca ccacccaatg ttcagctcac tggatatcga gtgcgggtga cccccaagga |
| 5821 | gaagaccgga ccaatgaaag aaatcaacct tgctcctgac agctcatccg tggttgtatc |
| 5881 | aggacttatg gtggccacca aatatgaagt gagtgtctat gctcttaagg acactttgac |
| 5941 | aagcagacca gctcagggag ttgtcaccac tctggagaat gtcagcccac caagaagggc |
| 6001 | tcgtgtgaca gatgctactg agaccaccat caccattagc tggagaacca agactgagac |
| 6061 | gatcactggc ttccaagttg atgccgttcc agccaatggc cagactccaa tccagagaac |
| 6121 | catcaagcca gatgtcagaa gctacaccat cacaggttta caaccaggca ctgactacaa |
| 6181 | gatctacctg tacaccttga atgacaatgc tcggagctcc cctgtggtca tcgacgcctc |
| 6241 | cactgccatt gatgcaccat ccaacctgcg tttcctggcc accacaccca attccttgct |
| 6301 | ggtatcatgg cagccgccac gtgccaggat taccggctac atcatcaagt atgagaagcc |
| 6361 | tgggtctcct cccagagaag tggtccctcg gccccgccct ggtgtcacag aggctactat |
| 6421 | tactggcctg gaaccgggaa ccgaatatac aatttatgtc attgccctga agaataatca |
| 6481 | gaagagcgag cccctgattg gaaggaaaaa gacagacgag cttccccaac tggtaaccct |
| 6541 | tccacacccc aatcttcatg gaccagagat cttggatgtt ccttccacag ttcaaaagac |
| 6601 | ccctttcgtc acccaccctg ggtatgacac tggaaatggt attcagcttc ctggcacttc |
| 6661 | tggtcagcaa cccagtgttg ggcaacaaat gatctttgag gaacatggtt ttaggcggac |
| 6721 | cacaccgccc acaacggcca cccccataag gcataggcca agaccatacc cgccgaatgt |
| 6781 | aggacaagaa gctctctctc agacaaccat ctcatgggcc ccattccagg acacttctga |
| 6841 | gtacatcatt tcatgtcatc ctgttggcac tgatgaagaa cccttacagt tcagggttcc |
| 6901 | tggaacttct accagtgcca ctctgacagg cctcaccaga ggtgccacct acaacatcat |
| 6961 | agtggaggca ctgaaagacc agcagaggca taaggttcgg gaagaggttg ttaccgtggg |
| 7021 | caactctgtc aacgaaggct tgaaccaacc tacggatgac tcgtgctttg acccctacac |
| 7081 | agtttcccat tatgccgttg gagatgagtg ggaacgaatg tctgaatcag gctttaaact |
| 7141 | gttgtgccag tgcttaggct ttggaagtgg tcatttcaga tgtgattcat ctagatggtg |
| 7201 | ccatgacaat ggtgtgaact acaagattgg agagaagtgg gaccgtcagg gagaaaatgg |
| 7261 | ccagatgatg agctgcacat gtcttgggaa cggaaaagga gaattcaagt gtgaccctca |
| 7321 | tgaggcaacg tgttatgatg atgggaagac ataccacgta ggagaacagt ggcagaagga |
| 7381 | atatctcggt gccatttgct cctgcacatg ctttggaggc cagcggggct ggcgctgtga |
| 7441 | caactgccgc agacctgggg gtgaacccag tcccgaaggc actactggcc agtcctacaa |
| 7501 | ccagtattct cagagatacc atcagagaac aaacactaat gttaattgcc caattgagtg |
| 7561 | cttcatgcct ttagatgtac aggctgacag agaagattcc cgagagtaaa tcatctttcc |
| 7621 | aatccagagg aacaagcatg tctctctgcc aagatccatc taaactggag tgatgttagc |
| 7681 | agacccagct tagagttctt ctttctttct taagcccttt gctctggagg aagttctcca |
| 7741 | gcttcagctc aactcacagc ttctccaagc atcaccctgg gagtttcctg agggttttct |
| 7801 | cataaatgag ggctgcacat tgcctgttct gcttcgaagt attcaatacc gctcagtatt |
| 7861 | ttaaatgaag tgattctaag atttggtttg ggatcaatag gaaagcatat gcagccaacc |
| 7921 | aagatgcaaa tgttttgaaa tgatatgacc aaaattttaa gtaggaaagt cacccaaaca |
| 7981 | cttctgcttt cacttaagtg tctggcccgc aatactgtag gaacaagcat gatcttgtta |
| 8041 | ctgtgatatt ttaaatatcc acagtactca ctttttccaa atgatcctag taattgccta |
| 8101 | gaaatatctt tctcttacct gttatttatc aatttttccc agtattttta tacggaaaaa |
| 8161 | attgtattga aaacacttag tatgcagttg ataagaggaa tttggtataa ttatggtggg |
| 8221 | tgattatttt ttatactgta tgtgccaaag ctttactact gtggaaagac aactgtttta |
| 8281 | ataaaagatt tacattccac aacttgaagt tcatctattt gatataagac accttcgggg |
| 8341 | gaaataattc ctgtgaatat tctttttcaa ttcagcaaac atttgaaaat ctatgatgtg |
| 8401 | caagtctaat tgttgatttc agtacaagat tttctaaatc agttgctaca aaaactgatt |
| 8461 | ggtttttgtc acttcatctc ttcactaatg gagatagctt tacactttct gctttaatag |
| 8521 | atttaagtgg accccaatat ttattaaaat tgctagttta ccgttcagaa gtataataga |
| 8581 | aataatcttt agttgctctt ttctaaccat tgtaattctt cccttcttcc ctccaccttt |
| 8641 | ccttcattga ataaacctct gttcaaagag attgcctgca agggaaataa aaatgactaa |
| 8701 | gatattaaaa gtatttgaat agtaaaaaaa aaaaaaaaaa aa |
| Vitronectin (NCBI Ref.: NM_000638.3; SEQ ID NO: 169) | |
| 1 | gagcaaacag agcagcagaa aaggcagttc ctcttctcca gtgccctcct tccctgtctc |
| 61 | tgcctctccc tcccttcctc aggcatcaga gcggagactt cagggagacc agagcccagc |
| 121 | ttgccaggca ctgagctaga agccctgcca tggcacccct gagacccctt ctcatactgg |
| 181 | ccctgctggc atgggttgct ctggctgacc aagagtcatg caagggccgc tgcactgagg |
| 241 | gcttcaacgt ggacaagaag tgccagtgtg acgagctctg ctcttactac cagagctgct |
| 301 | gcacagacta tacggctgag tgcaagcccc aagtgactcg cggggatgtg ttcactatgc |
| 361 | cggaggatga gtacacggtc tatgacgatg gcgaggagaa aaacaatgcc actgtccatg |
| 421 | aacaggtggg gggcccctcc ctgacctctg acctccaggc ccagtccaaa gggaatcctg |
| 481 | agcagacacc tgttctgaaa cctgaggaag aggcccctgc gcctgaggtg ggcgcctcta |
| 541 | agcctgaggg gatagactca aggcctgaga cccttcatcc agggagacct cagcccccag |
| 601 | cagaggagga gctgtgcagt gggaagccct tcgacgcctt caccgacctc aagaacggtt |
| 661 | ccctctttgc cttccgaggg cagtactgct atgaactgga cgaaaaggca gtgaggcctg |
| 721 | ggtaccccaa gctcatccga gatgtctggg gcatcgaggg ccccatcgat gccgccttca |
| 781 | cccgcatcaa ctgtcagggg aagacctacc tcttcaaggg tagtcagtac tggcgctttg |
| 841 | aggatggtgt cctggaccct gattaccccc gaaatatctc tgacggcttc gatggcatcc |
| 901 | cggacaacgt ggatgcagcc ttggccctcc ctgcccatag ctacagtggc cgggagcggg |
| 961 | tctacttctt caaggggaaa cagtactggg agtaccagtt ccagcaccag cccagtcagg |
| 1021 | aggagtgtga aggcagctcc ctgtcggctg tgtttgaaca ctttgccatg atgcagcggg |
| 1081 | acagctggga ggacatcttc gagcttctct tctggggcag aacctctgct ggtaccagac |
| 1141 | agccccagtt cattagccgg gactggcacg gtgtgccagg gcaagtggac gcagccatgg |
| 1201 | ctggccgcat ctacatctca ggcatggcac cccgcccctc cttggccaag aaacaaaggt |
| 1261 | ttaggcatcg caaccgcaaa ggctaccgtt cacaacgagg ccacagccgt ggccgcaacc |
| 1321 | agaactcccg ccggccatcc cgcgccacgt ggctgtcctt gttctccagt gaggagagca |
| 1381 | acttgggagc caacaactat gatgactaca ggatggactg gcttgtgcct gccacctgtg |
| 1441 | aacccatcca gagtgtcttc ttcttctctg gagacaagta ctaccgagtc aatcttcgca |
| 1501 | cacggcgagt ggacactgtg gaccctccct acccacgctc catcgctcag tactggctgg |
| 1561 | gctgcccagc tcctggccat ctgtaggagt cagagcccac atggccgggc cctctgtagc |
| 1621 | tccctcctcc catctccttc ccccagccca ataaaggtcc cttagccccg agtttaaa |
| Tenascin-C (NCBI Ref.: NM_002160.3; SEQ ID NO: 170) | |
| 1 | aattcgccaa ctgaaaaagt gggaaaggat gtctggaggc gaggcgtccc attacagagg |
| 61 | aaggagctcg ctatataagc cagccaaagt tggctgcacc ggccacagcc tgcctactgt |
| 121 | cacccgcctc tcccgcgcgc agatacacgc ccccgcctcc gtgggcacaa aggcagcgct |
| 181 | gctggggaac tcgggggaac gcgcacgtgg gaaccgccgc agctccacac tccaggtact |
| 241 | tcttccaagg acctaggtct ctcgcccatc ggaaagaaaa taattctttc aagaagatca |
| 301 | gggacaactg atttgaagtc tactctgtgc ttctaaatcc ccaattctgc tgaaagtgag |
| 361 | ataccctaga gccctagagc cccagcagca cccagccaaa cccacctcca ccatgggggc |
| 421 | catgactcag ctgttggcag gtgtctttct tgctttcctt gccctcgcta ccgaaggtgg |
| 481 | ggtcctcaag aaagtcatcc ggcacaagcg acagagtggg gtgaacgcca ccctgccaga |
| 541 | agagaaccag ccagtggtgt ttaaccacgt ttacaacatc aagctgccag tgggatccca |
| 601 | gtgttcggtg gatctggagt cagccagtgg ggagaaagac ctggcaccgc cttcagagcc |
| 661 | cagcgaaagc tttcaggagc acacagtgga tggggaaaac cagattgtct tcacacatcg |
| 721 | catcaacatc ccccgccggg cctgtggctg tgccgcagcc cctgatgtta aggagctgct |
| 781 | gagcagactg gaggagctgg agaacctggt gtcttccctg agggagcaat gtactgcagg |
| 841 | agcaggctgc tgtctccagc ctgccacagg ccgcttggac accaggccct tctgtagcgg |
| 901 | tcggggcaac ttcagcactg aaggatgtgg ctgtgtctgc gaacctggct ggaaaggccc |
| 961 | caactgctct gagcccgaat gtccaggcaa ctgtcacctt cgaggccggt gcattgatgg |
| 1021 | gcagtgcatc tgtgacgacg gcttcacggg cgaggactgc agccagctgg cttgccccag |
| 1081 | cgactgcaat gaccagggca agtgcgtaaa tggagtctgc atctgtttcg aaggctacgc |
| 1141 | cggggctgac tgcagccgtg aaatctgccc agtgccctgc agtgaggagc acggcacatg |
| 1201 | tgtagatggc ttgtgtgtgt gccacgatgg ctttgcaggc gatgactgca acaagcctct |
| 1261 | gtgtctcaac aattgctaca accgtggacg atgcgtggag aatgagtgcg tgtgtgatga |
| 1321 | gggtttcacg ggcgaagact gcagtgagct catctgcccc aatgactgct tcgaccgggg |
| 1381 | ccgctgcatc aatggcacct gctactgcga agaaggcttc acaggtgaag actgcgggaa |
| 1441 | acccacctgc ccacatgcct gccacaccca gggccggtgt gaggaggggc agtgtgtatg |
| 1501 | tgatgagggc tttgccggtg tggactgcag cgagaagagg tgtcctgctg actgtcacaa |
| 1561 | tcgtggccgc tgtgtagacg ggcggtgtga gtgtgatgat ggtttcactg gagctgactg |
| 1621 | tggggagctc aagtgtccca atggctgcag tggccatggc cgctgtgtca atgggcagtg |
| 1681 | tgtgtgtgat gagggctata ctggggagga ctgcagccag ctacggtgcc ccaatgactg |
| 1741 | tcacagtcgg ggccgctgtg tcgagggcaa atgtgtatgt gagcaaggct tcaagggcta |
| 1801 | tgactgcagt gacatgagct gccctaatga ctgtcaccag cacggccgct gtgtgaatgg |
| 4441 | cacagaggat ctcccacagc tgggagattt agccgtgtct gaggttggct gggatggcct |
| 4501 | cagactcaac tggaccgcag ctgacaatgc ctatgagcac tttgtcattc aggtgcagga |
| 4561 | ggtcaacaaa gtggaggcag cccagaacct cacgttgcct ggcagcctca gggctgtgga |
| 4621 | catcccgggc ctcgaggctg ccacgcctta tagagtctcc atctatgggg tgatccgggg |
| 4681 | ctatagaaca ccagtactct ctgctgaggc ctccacagcc aaagaacctg aaattggaaa |
| 4741 | cttaaatgtt tctgacataa ctcccgagag cttcaatctc tcctggatgg ctaccgatgg |
| 4801 | gatcttcgag acctttacca ttgaaattat tgattccaat aggttgctgg agactgtgga |
| 4861 | atataatatc tctggtgctg aacgaactgc ccatatctca gggctacccc ctagtactga |
| 4921 | ttttattgtc tacctctctg gacttgctcc cagcatccgg accaaaacca tcagtgccac |
| 4981 | agccacgaca gaggccctgc cccttctgga aaacctaacc atttccgaca ttaatcccta |
| 5041 | cgggttcaca gtttcctgga tggcatcgga gaatgccttt gacagctttc tagtaacggt |
| 5101 | ggtggattct gggaagctgc tggaccccca ggaattcaca ctttcaggaa cccagaggaa |
| 5161 | gctggagctt agaggcctca taactggcat tggctatgag gttatggtct ctggcttcac |
| 5221 | ccaagggcat caaaccaagc ccttgagggc tgagattgtt acagaagccg aaccggaagt |
| 5281 | tgacaacctt ctggtttcag atgccacccc agacggtttc cgtctgtcct ggacagctga |
| 5341 | tgaaggggtc ttcgacaatt ttgttctcaa aatcagagat accaaaaagc agtctgagcc |
| 5401 | actggaaata accctacttg cccccgaacg taccagggac ataacaggtc tcagagaggc |
| 5461 | tactgaatac gaaattgaac tctatggaat aagcaaagga aggcgatccc agacagtcag |
| 5521 | tgctatagca acaacagcca tgggctcccc aaaggaagtc attttctcag acatcactga |
| 5581 | aaattcggct actgtcagct ggagggcacc cacagcccaa gtggagagct tccggattac |
| 5641 | ctatgtgccc attacaggag gtacaccctc catggtaact gtggacggaa ccaagactca |
| 5701 | gaccaggctg gtgaaactca tacctggcgt ggagtacctt gtcagcatca tcgccatgaa |
| 5761 | gggctttgag gaaagtgaac ctgtctcagg gtcattcacc acagctctgg atggcccatc |
| 5821 | tggcctggtg acagccaaca tcactgactc agaagccttg gccaggtggc agccagccat |
| 5881 | tgccactgtg gacagttatg tcatctccta cacaggcgag aaagtgccag aaattacacg |
| 5941 | cacggtgtcc gggaacacag tggagtatgc tctgaccgac ctcgagcctg ccacggaata |
| 6001 | cacactgaga atctttgcag agaaagggcc ccagaagagc tcaaccatca ctgccaagtt |
| 6061 | cacaacagac ctcgattctc caagagactt gactgctact gaggttcagt cggaaactgc |
| 6121 | cctccttacc tggcgacccc cccgggcatc agtcaccggt tacctgctgg tctatgaatc |
| 6181 | agtggatggc acagtcaagg aagtcattgt gggtccagat accacctcct acagcctggc |
| 6241 | agacctgagc ccatccaccc actacacagc caagatccag gcactcaatg ggcccctgag |
| 6301 | gagcaatatg atccagacca tcttcaccac aattggactc ctgtacccct tccccaagga |
| 6361 | ctgctcccaa gcaatgctga atggagacac gacctctggc ctctacacca tttatctgaa |
| 6421 | tggtgataag gctgaggcgc tggaagtctt ctgtgacatg acctctgatg ggggtggatg |
| 6481 | gattgtgttc ctgagacgca aaaacggacg cgagaacttc taccaaaact ggaaggcata |
| 6541 | tgctgctgga tttggggacc gcagagaaga attctggctt gggctggaca acctgaacaa |
| 6601 | aatcacagcc caggggcagt acgagctccg ggtggacctg cgggaccatg gggagacagc |
| 6661 | ctttgctgtc tatgacaagt tcagcgtggg agatgccaag actcgctaca agctgaaggt |
| 6721 | ggaggggtac agtgggacag caggtgactc catggcctac cacaatggca gatccttctc |
| 6781 | cacctttgac aaggacacag attcagccat caccaactgt gctctgtcct acaaaggggc |
| 6841 | tttctggtac aggaactgtc accgtgtcaa cctgatgggg agatatgggg acaataacca |
| 6901 | cagtcagggc gttaactggt tccactggaa gggccacgaa cactcaatcc agtttgctga |
| 6961 | gatgaagctg agaccaagca acttcagaaa tcttgaaggc aggcgcaaac gggcataaat |
| 7021 | tccagggacc actgggtgag agaggaataa ggcccagagc gaggaaagga ttttaccaaa |
| 7081 | gcatcaatac aaccagccca accatcggtc cacacctggg catttggtga gagtcaaagc |
| 7141 | tgaccatgga tccctggggc caacggcaac agcatgggcc tcacctcctc tgtgatttct |
| 7201 | ttctttgcac caaagacatc agtctccaac atgtttctgt tttgttgttt gattcagcaa |
| 7261 | aaatctccca gtgacaacat cgcaatagtt ttttacttct cttaggtggc tctgggaatg |
| 7321 | ggagaggggt aggatgtaca ggggtagttt gttttagaac cagccgtatt ttacatgaag |
| 7381 | ctgtataatt aattgtcatt atttttgtta gcaaagatta aatgtgtcat tggaagccat |
| 7441 | cccttttttt acatttcata caacagaaac cagaaaagca atactgtttc cattttaagg |
| 7501 | atatgattaa tattattaat ataataatga tgatgatgat gatgaaaact aaggattttt |
| 7561 | caagagatct ttctttccaa aacatttctg gacagtacct gattgtattt tttttttaaa |
| 7621 | taaaagcaca agtacttttg agtttgttat tttgctttga attgttgagt ctgaatttca |
| 7681 | ccaaagccaa tcatttgaac aaagcgggga atgttgggat aggaaaggta agtagggata |
| 7741 | gtggtcaagt gggaggggtg gaaaggagac taaagactgg gagagaggga agcacttttt |
| 7801 | ttaaataaag ttgaacacac ttgggaaaag cttacaggcc aggcctgtaa tcccaacact |
| 7861 | ttgggaggcc aaggtgggag gatagcttaa ccccaggagt ttgagaccag cctgagcaac |
| 7921 | atagtgagaa cttgtctcta cagaaaaaaa aaaaaaaaaa aatttaatta ggcaagcgtg |
| 7981 | gtagtgcgca cctgtcgtcc cagctactca ggaggctgag gtaggaaaat cactggagcc |
| 8041 | caggagttag aggttacagt gagctatgat cacactactg cactccagcc tgggcaacag |
| 8101 | agggagaccc tgtctctaaa taaaaaaaga aaagaaaaaa aaagcttaca acttgagatt |
| 8161 | cagcatcttg ctcagtattt ccaagactaa tagattatgg tttaaaagat gcttttatac |
| 8221 | tcattttcta atgcaactcc tagaaactct atgatatagt tgaggtaagt attgttacca |
| 8281 | cacatgggct aagatcccca gaggcagact gcctgagttc aattcttggc tccaccattc |
| 8341 | ccaagttccc taacctctct atgcctcagt ttcctcttct gtaaagtagg gacactcata |
| 8401 | cttctcattt cagaacattt ttgtgaagaa taaattatgt tatccatttg aggcccttag |
| 8461 | aatggtaccc ggtgtatatt aagtgctagt acatgttagc tatcatcatt atcactttat |
| 8521 | atgagatgga ctggggttca tagaaaccca atgacttgat tgtggctact actcaataaa |
| 8581 | taatagaatt tggatttaaa aaaaa |
| Osteopontin (NCBI Ref.: NM_000582.2; SEQ ID NO: 171) | |
| 1 | ctccctgtgt tggtggagga tgtctgcagc agcatttaaa ttctgggagg gcttggttgt |
| 61 | cagcagcagc aggaggaggc agagcacagc atcgtcggga ccagactcgt ctcaggccag |
| 121 | ttgcagcctt ctcagccaaa cgccgaccaa ggaaaactca ctaccatgag aattgcagtg |
| 181 | atttgctttt gcctcctagg catcacctgt gccataccag ttaaacaggc tgattctgga |
| 241 | agttctgagg aaaagcagct ttacaacaaa tacccagatg ctgtggccac atggctaaac |
| 301 | cctgacccat ctcagaagca gaatctccta gccccacaga cccttccaag taagtccaac |
| 361 | gaaagccatg accacatgga tgatatggat gatgaagatg atgatgacca tgtggacagc |
| 421 | caggactcca ttgactcgaa cgactctgat gatgtagatg acactgatga ttctcaccag |
| 481 | tctgatgagt ctcaccattc tgatgaatct gatgaactgg tcactgattt tcccacggac |
| 541 | ctgccagcaa ccgaagtttt cactccagtt gtccccacag tagacacata tgatggccga |
| 601 | ggtgatagtg tggtttatgg actgaggtca aaatctaaga agtttcgcag acctgacatc |
| 661 | cagtaccctg atgctacaga cgaggacatc acctcacaca tggaaagcga ggagttgaat |
| 721 | ggtgcataca aggccatccc cgttgcccag gacctgaacg cgccttctga ttgggacagc |
| 781 | cgtgggaagg acagttatga aacgagtcag ctggatgacc agagtgctga aacccacagc |
| 841 | cacaagcagt ccagattata taagcggaaa gccaatgatg agagcaatga gcattccgat |
| 901 | gtgattgata gtcaggaact ttccaaagtc agccgtgaat tccacagcca tgaatttcac |
| 961 | agccatgaag atatgctggt tgtagacccc aaaagtaagg aagaagataa acacctgaaa |
| 1021 | tttcgtattt ctcatgaatt agatagtgca tcttctgagg tcaattaaaa ggagaaaaaa |
| 1081 | tacaatttct cactttgcat ttagtcaaaa gaaaaaatgc tttatagcaa aatgaaagag |
| 1141 | aacatgaaat gcttctttct cagtttattg gttgaatgtg tatctatttg agtctggaaa |
| 1201 | taactaatgt gtttgataat tagtttagtt tgtggcttca tggaaactcc ctgtaaacta |
| 1261 | aaagcttcag ggttatgtct atgttcattc tatagaagaa atgcaaacta tcactgtatt |
| 1321 | ttaatatttg ttattctctc atgaatagaa atttatgtag aagcaaacaa aatactttta |
| 1381 | cccacttaaa aagagaatat aacattttat gtcactataa tcttttgttt tttaagttag |
| 1441 | tgtatatttt gttgtgatta tctttttgtg gtgtgaataa atcttttatc ttgaatgtaa |
| 1501 | taagaatttg gtggtgtcaa ttgcttattt gttttcccac ggttgtccag caattaataa |
| 1561 | aacataacct tttttactgc ctaaaaaaaa aaaaaaaaaa aaaaaaaaaa aaaaaa |
| Nephronectin (NCBI Ref.: NM_001033047.2; SEQ ID NO: 172) | |
| 1 | tagaagggag cgggaggggg ctccgggcgc cgcgcagcag acctgctccg gccgcgcgcc |
| 61 | tcgccgctgt cctccgggag cggcagcagt agcccgggcg gcgagggctg ggggttcctc |
| 121 | gagactctca gaggggcgcc tcccatcggc gcccaccacc ccaacctgtt cctcgcgcgc |
| 181 | cactgcgctg cgccccagga cccgctgccc aacatggatt ttctcctggc gctggtgctg |
| 241 | gtatcctcgc tctacctgca ggcggccgcc gagttcgacg ggaggtggcc caggcaaata |
| 301 | gtgtcatcga ttggcctatg tcgttatggt gggaggattg actgctgctg gggctgggct |
| 361 | cgccagtctt ggggacagtg tcagcctgtg tgccaaccac gatgcaaaca tggtgaatgt |
| 421 | atcgggccaa acaagtgcaa gtgtcatcct ggttatgctg gaaaaacctg taatcaagat |
| 481 | ctaaatgagt gtggcctgaa gccccggccc tgtaagcaca ggtgcatgaa cacttacggc |
| 541 | agctacaagt gctactgtct caacggatat atgctcatgc cggatggttc ctgctcaagt |
| 601 | gccctgacct gctccatggc aaactgtcag tatggctgtg atgttgttaa aggacaaata |
| 661 | cggtgccagt gcccatcccc tggcctgcag ctggctcctg atgggaggac ctgtgtagat |
| 721 | gttgatgaat gtgctacagg aagagcctcc tgccctagat ttaggcaatg tgtcaacact |
| 781 | tttgggagct acatctgcaa gtgtcataaa ggcttcgatc tcatgtatat tggaggcaaa |
| 841 | tatcaatgtc atgacataga cgaatgctca cttggtcagt atcagtgcag cagctttgct |
| 901 | cgatgttata acatacgtgg gtcctacaag tgcaaatgta aagaaggata ccagggtgat |
| 961 | ggactgactt gtgtgtatat cccaaaagtt atgattgaac cttcaggtcc aattcatgta |
| 1021 | ccaaagggaa atggtaccat tttaaagggt gacacaggaa ataataattg gattcctgat |
| 1081 | gttggaagta cttggtggcc tccgaagaca ccatatattc ctcctatcat taccaacagg |
| 1141 | cctacttcta agccaacaac aagacctaca ccaaagccaa caccaattcc tactccacca |
| 1201 | ccaccaccac ccctgccaac agagctcaga acacctctac cacctacaac cccagaaagg |
| 1261 | ccaaccaccg gactgacaac tatagcacca gctgccagta cacctccagg agggattaca |
| 1321 | gttgacaaca gggtacagac agaccctcag aaacccagag gagatgtgtt cattccacgg |
| 1381 | caaccttcaa atgacttgtt tgaaatattt gaaatagaaa gaggagtcag tgcagacgat |
| 1441 | gaagcaaagg atgatccagg tgttctggta cacagttgta attttgacca tggactttgt |
| 1501 | ggatggatca gggagaaaga caatgacttg cactgggaac caatcaggga cccagcaggt |
| 1561 | ggacaatatc tgacagtgtc ggcagccaaa gccccagggg gaaaagctgc acgcttggtg |
| 1621 | ctacctctcg gccgcctcat gcattcaggg gacctgtgcc tgtcattcag gcacaaggtg |
| 1681 | acggggctgc actctggcac actccaggtg tttgtgagaa aacacggtgc ccacggagca |
| 1741 | gccctgtggg gaagaaatgg tggccatggc tggaggcaaa cacagatcac cttgcgaggg |
| 1801 | gctgacatca agagcgtcgt cttcaaaggt gaaaaaaggc gtggtcacac tggggagatt |
| 1861 | ggattagatg atgtgagctt gaaaaaaggc cactgctctg aagaacgcta acaactccag |
| 1921 | aactaacaat gaactcctat gttgctctat cctctttttc caattctcat cttctctcct |
| 1981 | cttctccctt ttatcaggcc taggagaaga gtgggtcagt gggtcagaag gaagtctatt |
| 2041 | tggtgaccca ggtttttctg gcctgctttt gtgcaatccc aatgaacagt gataccctcc |
| 2101 | ttgaaataca ggggcatcgc agacacatca aagccatctg tgggtgttgc cttccatcct |
| 2161 | gtgtctcttt caggaaggca ttcagcatgc gtgagccata ccatcctcca tcctgattac |
| 2221 | aaggtgctcc ttgtagcaaa ttatgagagt gagttacggg agcagttttt aaaagaaatc |
| 2281 | tttgcagatg gctatgatgt tatgtgttcg gtgttgtacc atgagtagta ttgacttccc |
| 2341 | ttgagatatg atgtacaatg tgcttgtgaa attgacttac cctcttcact taagttagtt |
| 2401 | ctggcctgac ctgaactctg acttttactg ccattcactt tataaaataa gggtgtgtaa |
| 2461 | catatcaaga tacatttatt tttatctgtt ttttttttcc tgttaaagac aattatgtag |
| 2521 | agtgggcacg taatccctcc ttagtagtat tgtgttttgt gtaaatgtgc tattgatatt |
| 2581 | aagtatttac atgttccaaa tatttacaga ctctagttgc aaggtaaagg gcagcttgtg |
| 2641 | atctcaaaaa aatacatggt gaaatgtcat ccagttccat gaccttatat tggcagcagt |
| 2701 | aggaaattgg cagaagtgtt gggttgtggt aacggagtga tgaatttttt tttaatggcc |
| 2761 | ttgagtttga tctctgcaaa ggataggaaa cctttaggaa gacaagaaac tgcagttaat |
| 2821 | ttagaactgt cactgtttca agttacactt taaaaccaca gcttttacca tcataacatg |
| 2881 | gctctggtaa tatgtaggaa gctttataaa agttttggtt gattcagaaa aaggatcctg |
| 2941 | ttgcagagtg agaggaagca tagggggaaa ctccattgga acagattttc acacaacgtt |
| 3001 | ttaaattgat ataagtttag gcagttgtag ttcataactt atgttgctca tgttgtgctg |
| 3061 | tgtcaggatg ggataggaag caagtcccat gcttagaggc atgggatgtg ttggaacggg |
| 3121 | atttacacac actggaggag cagggcaagt tggaattcta agatccatga acccccaact |
| 3181 | gtatttcctc cctgcatatt ttaccaatat attaaaaaac aatgtaactt ttaaaaggca |
| 3241 | tcattcctga ggtttgtctt aatttctgat taagtaatca gaatattttc tgctattttt |
| 3301 | gccaggaatc acaaagatga ttaaagggtt ggaaaaaaag atctatgatg gaaaattaaa |
| 3361 | ggaactggga ttattgagcc tggagaagag aagactgagg ggcaaaccat tgatggtttt |
| 3421 | caagtatatg aagggttggc acagagaggg tggcgaccag ctgttctcca tatgcactaa |
| 3481 | gaatagaaca agaggaaact ggcttagact agagtataag ggagcatttc ttggcagggg |
| 3541 | ccattgttag aatacttcat aaaaaaagaa gtgtgaaaat ctcagtatct ctctctcttt |
| 3601 | ctaaaaaatt agataaaaat ttgtctattt aagatggtta aagatgttct tacccaagga |
| 3661 | aaagtaacaa attatagaat ttcccaaaag atgttttgat cctactagta gtatgcagtg |
| 3721 | aaaatcttta gaactaaata atttggacaa ggcttaattt aggcatttcc ctcttgacct |
| 3781 | cctaatggag agggattgaa aggggaagag cccaccaaat gctgagctca ctgaaatatc |
| 3841 | tctcccttat ggcaatccta gcagtattaa agaaaaaagg aaactattta ttccaaatga |
| 3901 | gagtatgatg gacagatatt ttagtatctc agtaatgtcc tagtgtggcg gtggttttca |
| 3961 | atgtttcttc atgttaaagg tataagcctt tcatttgttc aatggatgat gtttcagatt |
| 4021 | tttttttttt taagagatcc ttcaaggaac acagttcaga gagattttca tcgggtgcat |
| 4081 | tctctctgct tcgtgtgtga caagttatct tggctgctga gaaagagtgc cctgccccac |
| 4141 | accggcagac ctttccttca cctcatcagt atgattcagt ttctcttatc aattggactc |
| 4201 | tcccaggttc cacagaacag taatattttt tgaacaatag gtacaataga aggtcttctg |
| 4261 | tcatttaacc tggtaaaggc agggctggag ggggaaaata aatcattaag cctttgagta |
| 4321 | acggcagaat atatggctgt agatccattt ttaatggttc atttccttta tggtcatata |
| 4381 | actgcacagc tgaagatgaa aggggaaaat aaatgaaaat tttacttttc gatgccaatg |
| 4441 | atacattgca ctaaactgat ggaagaagtt atccaaagta ctgtataaca tcttgtttat |
| 4501 | tatttaatgt tttctaaaat aaaaaatgtt agtggttttc caaatggcct aataaaaaca |
| 4561 | attatttgta aataaaaaca ctgttagtaa ta |
| Angiostatin (PLG) (NCBI Ref.: NM_000301.3; SEQ ID NO: 173) | |
| 1 | gaatcattaa cttaatttga ctatctggtt tgtggatgcg tttactctca tgtaagtcaa |
| 61 | caacatcctg ggattgggac ccactttctg ggcactgctg gccagtccca aaatggaaca |
| 121 | taaggaagtg gttcttctac ttcttttatt tctgaaatca ggtcaaggag agcctctgga |
| 181 | tgactatgtg aatacccagg gggcttcact gttcagtgtc actaagaagc agctgggagc |
| 241 | aggaagtata gaagaatgtg cagcaaaatg tgaggaggac gaagaattca cctgcagggc |
| 301 | attccaatat cacagtaaag agcaacaatg tgtgataatg gctgaaaaca ggaagtcctc |
| 361 | cataatcatt aggatgagag atgtagtttt atttgaaaag aaagtgtatc tctcagagtg |
| 421 | caagactggg aatggaaaga actacagagg gacgatgtcc aaaacaaaaa atggcatcac |
| 481 | ctgtcaaaaa tggagttcca cttctcccca cagacctaga ttctcacctg ctacacaccc |
| 541 | ctcagaggga ctggaggaga actactgcag gaatccagac aacgatccgc aggggccctg |
| 601 | gtgctatact actgatccag aaaagagata tgactactgc gacattcttg agtgtgaaga |
| 661 | ggaatgtatg cattgcagtg gagaaaacta tgacggcaaa atttccaaga ccatgtctgg |
| 721 | actggaatgc caggcctggg actctcagag cccacacgct catggataca ttccttccaa |
| 781 | atttccaaac aagaacctga agaagaatta ctgtcgtaac cccgataggg agctgcggcc |
| 841 | ttggtgtttc accaccgacc ccaacaagcg ctgggaactt tgtgacatcc cccgctgcac |
| 901 | aacacctcca ccatcttctg gtcccaccta ccagtgtctg aagggaacag gtgaaaacta |
| 961 | tcgcgggaat gtggctgtta ccgtgtccgg gcacacctgt cagcactgga gtgcacagac |
| 1021 | ccctcacaca cataacagga caccagaaaa cttcccctgc aaaaatttgg atgaaaacta |
| 1081 | ctgccgcaat cctgacggaa aaagggcccc atggtgccat acaaccaaca gccaagtgcg |
| 1141 | gtgggagtac tgtaagatac cgtcctgtga ctcctcccca gtatccacgg aacaattggc |
| 1201 | tcccacagca ccacctgagc taacccctgt ggtccaggac tgctaccatg gtgatggaca |
| 1261 | gagctaccga ggcacatcct ccaccaccac cacaggaaag aagtgtcagt cttggtcatc |
| 1321 | tatgacacca caccggcacc agaagacccc agaaaactac ccaaatgctg gcctgacaat |
| 1381 | gaactactgc aggaatccag atgccgataa aggcccctgg tgttttacca cagaccccag |
| 1441 | cgtcaggtgg gagtactgca acctgaaaaa atgctcagga acagaagcga gtgttgtagc |
| 1501 | acctccgcct gttgtcctgc ttccagatgt agagactcct tccgaagaag actgtatgtt |
| 1561 | tgggaatggg aaaggatacc gaggcaagag ggcgaccact gttactggga cgccatgcca |
| 1621 | ggactgggct gcccaggagc cccatagaca cagcattttc actccagaga caaatccacg |
| 1681 | ggcgggtctg gaaaaaaatt actgccgtaa ccctgatggt gatgtaggtg gtccctggtg |
| 1741 | ctacacgaca aatccaagaa aactttacga ctactgtgat gtccctcagt gtgcggcccc |
| 1801 | ttcatttgat tgtgggaagc ctcaagtgga gccgaagaaa tgtcctggaa gggttgtagg |
| 1861 | ggggtgtgtg gcccacccac attcctggcc ctggcaagtc agtcttagaa caaggtttgg |
| 1921 | aatgcacttc tgtggaggca ccttgatatc cccagagtgg gtgttgactg ctgcccactg |
| 1981 | cttggagaag tccccaaggc cttcatccta caaggtcatc ctgggtgcac accaagaagt |
| 2041 | gaatctcgaa ccgcatgttc aggaaataga agtgtctagg ctgttcttgg agcccacacg |
| 2101 | aaaagatatt gccttgctaa agctaagcag tcctgccgtc atcactgaca aagtaatccc |
| 2161 | agcttgtctg ccatccccaa attatgtggt cgctgaccgg accgaatgtt tcatcactgg |
| 2221 | ctggggagaa acccaaggta cttttggagc tggccttctc aaggaagccc agctccctgt |
| 2281 | gattgagaat aaagtgtgca atcgctatga gtttctgaat ggaagagtcc aatccaccga |
| 2341 | actctgtgct gggcatttgg ccggaggcac tgacagttgc cagggtgaca gtggaggtcc |
| 2401 | tctggtttgc ttcgagaagg acaaatacat tttacaagga gtcacttctt ggggtcttgg |
| 2461 | ctgtgcacgc cccaataagc ctggtgtcta tgttcgtgtt tcaaggtttg ttacttggat |
| 2521 | tgagggagtg atgagaaata attaattgga cgggagacag agtgacgcac tgactcacct |
| 2581 | agaggctgga acgtgggtag ggatttagca tgctggaaat aactggcagt aatcaaacga |
| 2641 | agacactgtc cccagctacc agctacgcca aacctcggca ttttttgtgt tattttctga |
| 2701 | ctgctggatt ctgtagtaag gtgacatagc tatgacattt gttaaaaata aactctgtac |
| 2761 | ttaactttga tttgagtaaa ttttggtttt ggtcttcaac attttcatgc tctttgttca |
| 2821 | ccccaccaat ttttaaatgg gcagatgggg ggatttagct gcttttgata aggaacagct |
| 2881 | gcacaaagga ctgagcaggc tgcaaggtca cagaggggag agccaagaag ttgtccacgc |
| 2941 | atttacctca tcagctaacg agggcttgac atgcattttt actgtcttta ttcctgacac |
| 3001 | tgagatgaat gttttcaaag ctgcaacatg tatggggagt catgcaaacc gattctgtta |
| 3061 | ttgggaatga aatctgtcac cgactgcttg acttgagccc aggggacacg gagcagagag |
| 3121 | ctgtatatga tggagtgaac cggtccatgg atgtgtaaca caagaccaac tgagagtctg |
| 3181 | aatgttattc tggggcacac gtgagtctag gattggtgcc aagagcatgt aaatgaacaa |
| 3241 | caagcaaata ttgaaggtgg accacttatt tcccattgct aattgcctgc ccggttttga |
| 3301 | aacagtctgc agtacacacg gtcacaggag aatgacctgt gggagagata catgtttaga |
| 3361 | aggaagagaa aggacaaagg cacacgtttt accatttaaa atattgttac caaacaaaaa |
| 3421 | tatccattca aaatacaatt taacaatgca acagtcatct tacagcagag aaatgcagag |
| 3481 | aaaagcaaaa ctgcaagtga ctgtgaataa agggtgaatg tagtctcaaa tcctcaaa |
| Tissue transglutaminase factor XIII (F13A1) (NCBI Ref.: NM_000129.3; | |
| SEQ ID NO: 174) | |
| 1 | atttaagagc caactgtctt gtctttcccg agtccgtttg aggaagtccc cgaggcgcac |
| 61 | agagcaagcc cacgcgaggg cacctctgga ggggagcgcc tgcaggacct tgtaaagtca |
| 121 | aaaatgtcag aaacttccag gaccgccttt ggaggcagaa gagcagttcc acccaataac |
| 181 | tctaatgcag cggaagatga cctgcccaca gtggagcttc agggcgtggt gccccggggc |
| 241 | gtcaacctgc aagagtttct taatgtcacg agcgttcacc tgttcaagga gagatgggac |
| 301 | actaacaagg tggaccacca cactgacaag tatgaaaaca acaagctgat tgtccgcaga |
| 361 | gggcagtctt tctatgtgca gattgacttc agtcgtccat atgaccccag aagggatctc |
| 421 | ttcagggtgg aatacgtcat tggtcgctac ccacaggaga acaagggaac ctacatccca |
| 481 | gtgcctatag tctcagagtt acaaagtgga aagtgggggg ccaagattgt catgagagag |
| 541 | gacaggtctg tgcggctgtc catccagtct tcccccaaat gtattgtggg gaaattccgc |
| 601 | atgtatgttg ctgtctggac tccctatggc gtacttcgaa ccagtcgaaa cccagaaaca |
| 661 | gacacgtaca ttctcttcaa tccttggtgt gaagatgatg ctgtgtatct ggacaatgag |
| 721 | aaagaaagag aagagtatgt cctgaatgac atcggggtaa ttttttatgg agaggtcaat |
| 781 | gacatcaaga ccagaagctg gagctatggt cagtttgaag atggcatcct ggacacttgc |
| 841 | ctgtatgtga tggacagagc acaaatggac ctctctggaa gagggaatcc catcaaagtc |
| 901 | agccgtgtgg ggtctgcaat ggtgaatgcc aaagatgacg aaggtgtcct cgttggatcc |
| 961 | tgggacaata tctatgccta tggcgtcccc ccatcggcct ggactggaag cgttgacatt |
| 1021 | ctattggaat accggagctc tgagaatcca gtccggtatg gccaatgctg ggtttttgct |
| 1081 | ggtgtcttta acacattttt acgatgcctt ggaataccag caagaattgt taccaattat |
| 1141 | ttctctgccc atgataatga tgccaatttg caaatggaca tcttcctgga agaagatggg |
| 1201 | aacgtgaatt ccaaactcac caaggattca gtgtggaact accactgctg gaatgaagca |
| 1261 | tggatgacaa ggcctgacct tcctgttgga tttggaggct ggcaagctgt ggacagcacc |
| 1321 | ccccaggaaa atagcgatgg catgtatcgg tgtggccccg cctcggttca agccatcaag |
| 1381 | cacggccatg tctgcttcca atttgatgca ccttttgttt ttgcagaggt caacagcgac |
| 1441 | ctcatttaca ttacagctaa gaaagatggc actcatgtgg tggaaaatgt ggatgccacc |
| 1501 | cacattggga aattaattgt gaccaaacaa attggaggag atggcatgat ggatattact |
| 1561 | gatacttaca aattccaaga aggtcaagaa gaagagagat tggccctaga aactgccctg |
| 1621 | atgtacggag ctaaaaagcc cctcaacaca gaaggtgtca tgaaatcaag gtccaacgtt |
| 1681 | gacatggact ttgaagtgga aaatgctgtg ctgggaaaag acttcaagct ctccatcacc |
| 1741 | ttccggaaca acagccacaa ccgttacacc atcacagctt atctctcagc caacatcacc |
| 1801 | ttctacaccg gggtcccgaa ggcagaattc aagaaggaga cgttcgacgt gacgctggag |
| 1861 | cccttgtcct tcaagaaaga ggcggtgctg atccaagccg gcgagtacat gggtcagctg |
| 1921 | ctggaacaag cgtccctgca cttctttgtc acagctcgca tcaatgagac cagggatgtt |
| 1981 | ctggccaagc aaaagtccac cgtgctaacc atccctgaga tcatcatcaa ggtccgtggc |
| 2041 | actcaggtag ttggttctga catgactgtg acagttgagt ttaccaatcc tttaaaagaa |
| 2101 | accctgcgaa atgtctgggt acacctggat ggtcctggag taacaagacc aatgaagaag |
| 2161 | atgttccgtg aaatccggcc caactccacc gtgcagtggg aagaagtgtg ccggccctgg |
| 2221 | gtctctgggc atcggaagct gatagccagc atgagcagtg actccctgag acatgtgtat |
| 2281 | ggcgagctgg acgtgcagat tcaaagacga ccttccatgt gaatgcacag gaagctgaga |
| 2341 | tgaaccctgg catttggcct cttgtagtct tggctaagga aattctaacg caaaaatagc |
| 2401 | tcttgctttg acttaggtgt gaagacccag acaggactgc agagggctcc agagtggaga |
| 2461 | tcccacatat ttcaaaaaca tgcttttcca aacccaggct attcggcaag gaagttagtt |
| 2521 | tttaatctct ccaccttcca aagagtgcta agcattagct ttaattaagc tctcatagct |
| 2581 | cataagagta acagtcatca tttatcatca caaatggcta catctccaaa tatcagtggg |
| 2641 | ctctcttacc agggagattt gctcaatacc tggcctcatt taaaacaaga cttcagattc |
| 2701 | cccactcagc cttttgggaa taatagcaca tgatttgggc tctagaattc cagtcccctt |
| 2761 | tctcggggtc aggttctacc ctccatgtga gaatattttt cccaggacta gagcacaaca |
| 2821 | taatttttat ttttggcaaa gccagaaaaa gatctttcat tttgcacctg cagccaagca |
| 2881 | aatgcctgcc aaattttaga tttaccttgt tagaagaggt ggccccatat taacaaattg |
| 2941 | catttgtggg aaacttaacc acctacaagg agataagaaa gcaggtgcaa cactcaagtc |
| 3001 | tattgaataa tgtagttttg tgatgcattt tatagaatgt gtcacactgt ggcctgatca |
| 3061 | gcaggagcca atatccctta ctttaaccct ttctgggatg caatactagg aagtaaagtg |
| 3121 | aagaatttat ctctttagtt agtgattata tttcacccat ctctcaggaa tcatctcctt |
| 3181 | tgcagaatga tgcaggttca ggtccccttt cagagatata ataagcccaa caagttgaag |
| 3241 | aagctggcgg atctagtgac cagatatata gaaggactgc agccactgat tctctcttgt |
| 3301 | ccttcacatc acccatgttg agacctcagc ttggcactca ggtgctgaag ggtaatatgg |
| 3361 | actcagcctt gcaaatagcc agtgctagtt ctgacccaac cacagaggat gctgacatca |
| 3421 | tttgtattat gttccaaggc tactacagag aaggctgcct gctatgtatt tgcaaggctg |
| 3481 | atttatggtc agaatttccc tctgatatgt ctagggtgtg atttaggtca gtagactgtg |
| 3541 | attcttagca aaaaatgaac agtgataagt atactggggg caaaatcaga atggaatgct |
| 3601 | ctggtctata taaccacatt tctaagcctt tgagactgtt cctgagcctt cagcactaac |
| 3661 | ctatgagggt gagctggtcc cctctatata tacatcatac ttaactttac taagtaatct |
| 3721 | cacagcattt gccaagtctc ccaatatcca attttaaaat gaaatgcatt ttgctagaca |
| 3781 | gttaaactgg cttaacttag tatattatta ttaattacaa tgtaatagaa gcttaaaata |
| 3841 | aagttaaact gattatattt gca |
| Von Willebrand Factor (NCBI Ref.: NM_000552.4; SEQ ID NO: 175) | |
| 1 | gtggcagctc acagctattg tggtgggaaa gggagggtgg ttggtggatg tcacagcttg |
| 61 | ggctttatct cccccagcag tggggactcc acagcccctg ggctacataa cagcaagaca |
| 121 | gtccggagct gtagcagacc tgattgagcc tttgcagcag ctgagagcat ggcctagggt |
| 181 | gggcggcacc attgtccagc agctgagttt cccagggacc ttggagatag ccgcagccct |
| 241 | catttgcagg ggaagatgat tcctgccaga tttgccgggg tgctgcttgc tctggccctc |
| 301 | attttgccag ggaccctttg tgcagaagga actcgcggca ggtcatccac ggcccgatgc |
| 361 | agccttttcg gaagtgactt cgtcaacacc tttgatggga gcatgtacag ctttgcggga |
| 421 | tactgcagtt acctcctggc agggggctgc cagaaacgct ccttctcgat tattggggac |
| 481 | ttccagaatg gcaagagagt gagcctctcc gtgtatcttg gggaattttt tgacatccat |
| 541 | ttgtttgtca atggtaccgt gacacagggg gaccaaagag tctccatgcc ctatgcctcc |
| 601 | aaagggctgt atctagaaac tgaggctggg tactacaagc tgtccggtga ggcctatggc |
| 661 | tttgtggcca ggatcgatgg cagcggcaac tttcaagtcc tgctgtcaga cagatacttc |
| 721 | aacaagacct gcgggctgtg tggcaacttt aacatctttg ctgaagatga ctttatgacc |
| 781 | caagaaggga ccttgacctc ggacccttat gactttgcca actcatgggc tctgagcagt |
| 841 | ggagaacagt ggtgtgaacg ggcatctcct cccagcagct catgcaacat ctcctctggg |
| 901 | gaaatgcaga agggcctgtg ggagcagtgc cagcttctga agagcacctc ggtgtttgcc |
| 961 | cgctgccacc ctctggtgga ccccgagcct tttgtggccc tgtgtgagaa gactttgtgt |
| 1021 | gagtgtgctg gggggctgga gtgcgcctgc cctgccctcc tggagtacgc ccggacctgt |
| 1081 | gcccaggagg gaatggtgct gtacggctgg accgaccaca gcgcgtgcag cccagtgtgc |
| 1141 | cctgctggta tggagtatag gcagtgtgtg tccccttgcg ccaggacctg ccagagcctg |
| 1201 | cacatcaatg aaatgtgtca ggagcgatgc gtggatggct gcagctgccc tgagggacag |
| 1261 | ctcctggatg aaggcctctg cgtggagagc accgagtgtc cctgcgtgca ttccggaaag |
| 1321 | cgctaccctc ccggcacctc cctctctcga gactgcaaca cctgcatttg ccgaaacagc |
| 1381 | cagtggatct gcagcaatga agaatgtcca ggggagtgcc ttgtcacagg tcaatcacac |
| 1441 | ttcaagagct ttgacaacag atacttcacc ttcagtggga tctgccagta cctgctggcc |
| 1501 | cgggattgcc aggaccactc cttctccatt gtcattgaga ctgtccagtg tgctgatgac |
| 1561 | cgcgacgctg tgtgcacccg ctccgtcacc gtccggctgc ctggcctgca caacagcctt |
| 1621 | gtgaaactga agcatggggc aggagttgcc atggatggcc aggacgtcca gctccccctc |
| 1681 | ctgaaaggtg acctccgcat ccagcataca gtgacggcct ccgtgcgcct cagctacggg |
| 1741 | gaggacctgc agatggactg ggatggccgc gggaggctgc tggtgaagct gtcccccgtc |
| 1801 | tatgccggga agacctgcgg cctgtgtggg aattacaatg gcaaccaggg cgacgacttc |
| 1861 | cttaccccct ctgggctggc ggagccccgg gtggaggact tcgggaacgc ctggaagctg |
| 1921 | cacggggact gccaggacct gcagaagcag cacagcgatc cctgcgccct caacccgcgc |
| 1981 | atgaccaggt tctccgagga ggcgtgcgcg gtcctgacgt cccccacatt cgaggcctgc |
| 2041 | catcgtgccg tcagcccgct gccctacctg cggaactgcc gctacgacgt gtgctcctgc |
| 2101 | tcggacggcc gcgagtgcct gtgcggcgcc ctggccagct atgccgcggc ctgcgcgggg |
| 2161 | agaggcgtgc gcgtcgcgtg gcgcgagcca ggccgctgtg agctgaactg cccgaaaggc |
| 2221 | caggtgtacc tgcagtgcgg gaccccctgc aacctgacct gccgctctct ctcttacccg |
| 2281 | gatgaggaat gcaatgaggc ctgcctggag ggctgcttct gccccccagg gctctacatg |
| 2341 | gatgagaggg gggactgcgt gcccaaggcc cagtgcccct gttactatga cggtgagatc |
| 2401 | ttccagccag aagacatctt ctcagaccat cacaccatgt gctactgtga ggatggcttc |
| 2461 | atgcactgta ccatgagtgg agtccccgga agcttgctgc ctgacgctgt cctcagcagt |
| 2521 | cccctgtctc atcgcagcaa aaggagccta tcctgtcggc cccccatggt caagctggtg |
| 2581 | tgtcccgctg acaacctgcg ggctgaaggg ctcgagtgta ccaaaacgtg ccagaactat |
| 2641 | gacctggagt gcatgagcat gggctgtgtc tctggctgcc tctgcccccc gggcatggtc |
| 2701 | cggcatgaga acagatgtgt ggccctggaa aggtgtccct gcttccatca gggcaaggag |
| 2761 | tatgcccctg gagaaacagt gaagattggc tgcaacactt gtgtctgtcg ggaccggaag |
| 2821 | tggaactgca cagaccatgt gtgtgatgcc acgtgctcca cgatcggcat ggcccactac |
| 2881 | ctcaccttcg acgggctcaa atacctgttc cccggggagt gccagtacgt tctggtgcag |
| 2941 | gattactgcg gcagtaaccc tgggaccttt cggatcctag tggggaataa gggatgcagc |
| 3001 | cacccctcag tgaaatgcaa gaaacgggtc accatcctgg tggagggagg agagattgag |
| 3061 | ctgtttgacg gggaggtgaa tgtgaagagg cccatgaagg atgagactca ctttgaggtg |
| 3121 | gtggagtctg gccggtacat cattctgctg ctgggcaaag ccctctccgt ggtctgggac |
| 3181 | cgccacctga gcatctccgt ggtcctgaag cagacatacc aggagaaagt gtgtggcctg |
| 3241 | tgtgggaatt ttgatggcat ccagaacaat gacctcacca gcagcaacct ccaagtggag |
| 3301 | gaagaccctg tggactttgg gaactcctgg aaagtgagct cgcagtgtgc tgacaccaga |
| 3361 | aaagtgcctc tggactcatc ccctgccacc tgccataaca acatcatgaa gcagacgatg |
| 3421 | gtggattcct cctgtagaat ccttaccagt gacgtcttcc aggactgcaa caagctggtg |
| 3481 | gaccccgagc catatctgga tgtctgcatt tacgacacct gctcctgtga gtccattggg |
| 3541 | gactgcgcct gcttctgcga caccattgct gcctatgccc acgtgtgtgc ccagcatggc |
| 3601 | aaggtggtga cctggaggac ggccacattg tgcccccaga gctgcgagga gaggaatctc |
| 3661 | cgggagaacg ggtatgagtg tgagtggcgc tataacagct gtgcacctgc ctgtcaagtc |
| 3721 | acgtgtcagc accctgagcc actggcctgc cctgtgcagt gtgtggaggg ctgccatgcc |
| 3781 | cactgccctc cagggaaaat cctggatgag cttttgcaga cctgcgttga ccctgaagac |
| 3841 | tgtccagtgt gtgaggtggc tggccggcgt tttgcctcag gaaagaaagt caccttgaat |
| 3901 | cccagtgacc ctgagcactg ccagatttgc cactgtgatg ttgtcaacct cacctgtgaa |
| 3961 | gcctgccagg agccgggagg cctggtggtg cctcccacag atgccccggt gagccccacc |
| 4021 | actctgtatg tggaggacat ctcggaaccg ccgttgcacg atttctactg cagcaggcta |
| 4081 | ctggacctgg tcttcctgct ggatggctcc tccaggctgt ccgaggctga gtttgaagtg |
| 4141 | ctgaaggcct ttgtggtgga catgatggag cggctgcgca tctcccagaa gtgggtccgc |
| 4201 | gtggccgtgg tggagtacca cgacggctcc cacgcctaca tcgggctcaa ggaccggaag |
| 4261 | cgaccgtcag agctgcggcg cattgccagc caggtgaagt atgcgggcag ccaggtggcc |
| 4321 | tccaccagcg aggtcttgaa atacacactg ttccaaatct tcagcaagat cgaccgccct |
| 4381 | gaagcctccc gcatcaccct gctcctgatg gccagccagg agccccaacg gatgtcccgg |
| 4441 | aactttgtcc gctacgtcca gggcctgaag aagaagaagg tcattgtgat cccggtgggc |
| 4501 | attgggcccc atgccaacct caagcagatc cgcctcatcg agaagcaggc ccctgagaac |
| 4561 | aaggccttcg tgctgagcag tgtggatgag ctggagcagc aaagggacga gatcgttagc |
| 4621 | tacctctgtg accttgcccc tgaagcccct cctcctactc tgccccccga catggcacaa |
| 4681 | gtcactgtgg gcccggggct cttgggggtt tcgaccctgg ggcccaagag gaactccatg |
| 4741 | gttctggatg tggcgttcgt cctggaagga tcggacaaaa ttggtgaagc cgacttcaac |
| 4801 | aggagcaagg agttcatgga ggaggtgatt cagcggatgg atgtgggcca ggacagcatc |
| 4861 | cacgtcacgg tgctgcagta ctcctacatg gtgactgtgg agtacccctt cagcgaggca |
| 4921 | cagtccaaag gggacatcct gcagcgggtg cgagagatcc gctaccaggg cggcaacagg |
| 4981 | accaacactg ggctggccct gcggtacctc tctgaccaca gcttcttggt cagccagggt |
| 5041 | gaccgggagc aggcgcccaa cctggtctac atggtcaccg gaaatcctgc ctctgatgag |
| 5101 | atcaagaggc tgcctggaga catccaggtg gtgcccattg gagtgggccc taatgccaac |
| 5161 | gtgcaggagc tggagaggat tggctggccc aatgccccta tcctcatcca ggactttgag |
| 5221 | acgctccccc gagaggctcc tgacctggtg ctgcagaggt gctgctccgg agaggggctg |
| 5281 | cagatcccca ccctctcccc tgcacctgac tgcagccagc ccctggacgt gatccttctc |
| 5341 | ctggatggct cctccagttt cccagcttct tattttgatg aaatgaagag tttcgccaag |
| 5401 | gctttcattt caaaagccaa tatagggcct cgtctcactc aggtgtcagt gctgcagtat |
| 5461 | ggaagcatca ccaccattga cgtgccatgg aacgtggtcc cggagaaagc ccatttgctg |
| 5521 | agccttgtgg acgtcatgca gcgggaggga ggccccagcc aaatcgggga tgccttgggc |
| 5581 | tttgctgtgc gatacttgac ttcagaaatg catggtgcca ggccgggagc ctcaaaggcg |
| 5641 | gtggtcatcc tggtcacgga cgtctctgtg gattcagtgg atgcagcagc tgatgccgcc |
| 5701 | aggtccaaca gagtgacagt gttccctatt ggaattggag atcgctacga tgcagcccag |
| 5761 | ctacggatct tggcaggccc agcaggcgac tccaacgtgg tgaagctcca gcgaatcgaa |
| 5821 | gacctcccta ccatggtcac cttgggcaat tccttcctcc acaaactgtg ctctggattt |
| 5881 | gttaggattt gcatggatga ggatgggaat gagaagaggc ccggggacgt ctggaccttg |
| 5941 | ccagaccagt gccacaccgt gacttgccag ccagatggcc agaccttgct gaagagtcat |
| 6001 | cgggtcaact gtgaccgggg gctgaggcct tcgtgcccta acagccagtc ccctgttaaa |
| 6061 | gtggaagaga cctgtggctg ccgctggacc tgcccctgcg tgtgcacagg cagctccact |
| 6121 | cggcacatcg tgacctttga tgggcagaat ttcaagctga ctggcagctg ttcttatgtc |
| 6181 | ctatttcaaa acaaggagca ggacctggag gtgattctcc ataatggtgc ctgcagccct |
| 6241 | ggagcaaggc agggctgcat gaaatccatc gaggtgaagc acagtgccct ctccgtcgag |
| 6301 | ctgcacagtg acatggaggt gacggtgaat gggagactgg tctctgttcc ttacgtgggt |
| 6361 | gggaacatgg aagtcaacgt ttatggtgcc atcatgcatg aggtcagatt caatcacctt |
| 6421 | ggtcacatct tcacattcac tccacaaaac aatgagttcc aactgcagct cagccccaag |
| 6481 | acttttgctt caaagacgta tggtctgtgt gggatctgtg atgagaacgg agccaatgac |
| 6541 | ttcatgctga gggatggcac agtcaccaca gactggaaaa cacttgttca ggaatggact |
| 6601 | gtgcagcggc cagggcagac gtgccagccc atcctggagg agcagtgtct tgtccccgac |
| 6661 | agctcccact gccaggtcct cctcttacca ctgtttgctg aatgccacaa ggtcctggct |
| 6721 | ccagccacat tctatgccat ctgccagcag gacagttgcc accaggagca agtgtgtgag |
| 6781 | gtgatcgcct cttatgccca cctctgtcgg accaacgggg tctgcgttga ctggaggaca |
| 6841 | cctgatttct gtgctatgtc atgcccacca tctctggtct acaaccactg tgagcatggc |
| 6901 | tgtccccggc actgtgatgg caacgtgagc tcctgtgggg accatccctc cgaaggctgt |
| 6961 | ttctgccctc cagataaagt catgttggaa ggcagctgtg tccctgaaga ggcctgcact |
| 7021 | cagtgcattg gtgaggatgg agtccagcac cagttcctgg aagcctgggt cccggaccac |
| 7081 | cagccctgtc agatctgcac atgcctcagc gggcggaagg tcaactgcac aacgcagccc |
| 7141 | tgccccacgg ccaaagctcc cacgtgtggc ctgtgtgaag tagcccgcct ccgccagaat |
| 7201 | gcagaccagt gctgccccga gtatgagtgt gtgtgtgacc cagtgagctg tgacctgccc |
| 7261 | ccagtgcctc actgtgaacg tggcctccag cccacactga ccaaccctgg cgagtgcaga |
| 7321 | cccaacttca cctgcgcctg caggaaggag gagtgcaaaa gagtgtcccc accctcctgc |
| 7381 | cccccgcacc gtttgcccac ccttcggaag acccagtgct gtgatgagta tgagtgtgcc |
| 7441 | tgcaactgtg tcaactccac agtgagctgt ccccttgggt acttggcctc aactgccacc |
| 7501 | aatgactgtg gctgtaccac aaccacctgc cttcccgaca aggtgtgtgt ccaccgaagc |
| 7561 | accatctacc ctgtgggcca gttctgggag gagggctgcg atgtgtgcac ctgcaccgac |
| 7621 | atggaggatg ccgtgatggg cctccgcgtg gcccagtgct cccagaagcc ctgtgaggac |
| 7681 | agctgtcggt cgggcttcac ttacgttctg catgaaggcg agtgctgtgg aaggtgcctg |
| 7741 | ccatctgcct gtgaggtggt gactggctca ccgcgggggg actcccagtc ttcctggaag |
| 7801 | agtgtcggct cccagtgggc ctccccggag aacccctgcc tcatcaatga gtgtgtccga |
| 7861 | gtgaaggagg aggtctttat acaacaaagg aacgtctcct gcccccagct ggaggtccct |
| 7921 | gtctgcccct cgggctttca gctgagctgt aagacctcag cgtgctgccc aagctgtcgc |
| 7981 | tgtgagcgca tggaggcctg catgctcaat ggcactgtca ttgggcccgg gaagactgtg |
| 8041 | atgatcgatg tgtgcacgac ctgccgctgc atggtgcagg tgggggtcat ctctggattc |
| 8101 | aagctggagt gcaggaagac cacctgcaac ccctgccccc tgggttacaa ggaagaaaat |
| 8161 | aacacaggtg aatgttgtgg gagatgtttg cctacggctt gcaccattca gctaagagga |
| 8221 | ggacagatca tgacactgaa gcgtgatgag acgctccagg atggctgtga tactcacttc |
| 8281 | tgcaaggtca atgagagagg agagtacttc tgggagaaga gggtcacagg ctgcccaccc |
| 8341 | tttgatgaac acaagtgtct ggctgaggga ggtaaaatta tgaaaattcc aggcacctgc |
| 8401 | tgtgacacat gtgaggagcc tgagtgcaac gacatcactg ccaggctgca gtatgtcaag |
| 8461 | gtgggaagct gtaagtctga agtagaggtg gatatccact actgccaggg caaatgtgcc |
| 8521 | agcaaagcca tgtactccat tgacatcaac gatgtgcagg accagtgctc ctgctgctct |
| 8581 | ccgacacgga cggagcccat gcaggtggcc ctgcactgca ccaatggctc tgttgtgtac |
| 8641 | catgaggttc tcaatgccat ggagtgcaaa tgctccccca ggaagtgcag caagtgaggc |
| 8701 | tgctgcagct gcatgggtgc ctgctgctgc ctgccttggc ctgatggcca ggccagagtg |
| 8761 | ctgccagtcc tctgcatgtt ctgctcttgt gcccttctga gcccacaata aaggctgagc |
| 8821 | tcttatcttg caaaaggc |
| ADAM2 (NCBI Ref.: NM_001278113.1; SEQ ID NO: 176) | |
| 1 | gcctacctct tccaggctgc gtggccgggg cgtcatctcg cgcttccaac tgccctgtaa |
| 61 | ccaccaactg ccattattcc ggctgggacc caggacttca agccatgtgg cgcgtcttgt |
| 121 | ttctgctcag cgggctcggc gggctgcgga tggacagtaa ttttgatagt ttacctgtgc |
| 181 | aaattacagt tccggagaaa atacggtcaa taataaagga aggaattgaa tcgcaggcat |
| 241 | cctacaaaat tgtaattgaa gggaaaccat atactgtgaa tttaatgcaa aaaaactttt |
| 301 | taccccataa ttttagagtt tacagttata gtggcacagg aattatgaaa ccacttgacc |
| 361 | aagattttca gaatttctgc cactaccaag ggtatattga aggttatcca aaatctgtgg |
| 421 | tgatggttag cacatgtact ggactcaggg gcgtactaca gtttgaaaat gttagttatg |
| 481 | gaatagaacc cctggagtct tcagttggct ttgaacatgt aatttaccaa gtaaaacata |
| 541 | agaaagcaga tgtttcctta tataatgaga aggatattga atcaagagat ctgtccttta |
| 601 | aattacaaag cgtagagtat aatcatatgg ggtctgatac aactgttgtc gctcaaaaag |
| 661 | ttttccagtt gattggattg acgaatgcta tttttgtttc atttaatatt acaattattc |
| 721 | tgtcttcatt ggagctttgg atagatgaaa ataaaattgc aaccactgga gaagctaatg |
| 781 | agttattaca cacattttta agatggaaaa catcttatct tgttttacgt cctcatgatg |
| 841 | tggcattttt acttgtttac agagaaaagt caaattatgt tggtgcaacc tttcaaggga |
| 901 | agatgtgtga tgcaaactat gcaggaggtg ttgttctgca ccccagaacc ataagtctgg |
| 961 | aatcacttgc agttatttta gctcaattat tgagccttag tatggggatc acttatgatg |
| 1021 | acattaacaa atgccagtgc tcaggagctg tctgcattat gaatccagaa gcaattcatt |
| 1081 | tcagtggtgt gaagatcttt agtaactgca gcttcgaaga ctttgcacat tttatttcaa |
| 1141 | agcagaagtc ccagtgtctt cacaatcagc ctcgcttaga tccttttttc aaacagcaag |
| 1201 | cagtgtgtgg taatgcaaag ctggaagcag gagaggagtg tgactgtggg actgaacagg |
| 1261 | attgtgccct tattggagaa acatgctgtg atattgccac atgtagattt aaagccggtt |
| 1321 | caaactgtgc tgaaggacca tgctgcgaaa actgtctatt tatgtcaaaa gaaagaatgt |
| 1381 | gtaggccttc ctttgaagaa tgcgacctcc ctgaatattg caatggatca tctgcatcat |
| 1441 | gcccagaaaa ccactatgtt cagactgggc atccgtgtgg actgaatcaa tggatctgta |
| 1501 | tagatggagt ttgtatgagt ggggataaac aatgtacaga cacatttggc aaagaagtag |
| 1561 | agtttggccc ttcagaatgt tattctcacc ttaattcaaa gactgatgta tctggaaact |
| 1621 | gtggtataag tgattcagga tacacacagt gtgaagctga caatctgcag tgcggaaaat |
| 1681 | taatatgtaa atatgtaggt aaatttttat tacaaattcc aagagccact attatttatg |
| 1741 | ccaacataag tggacatctc tgcattgctg tggaatttgc cagtgatcat gcagacagcc |
| 1801 | aaaagatgtg gataaaagat ggaacttctt gtggttcaaa taaggtttgc aggaatcaaa |
| 1861 | gatgtgtgag ttcttcatac ttgggttatg attgtactac tgacaaatgc aatgatagag |
| 1921 | gtgtatgcaa taacaaaaag cactgtcact gtagtgcttc atatttacct ccagattgct |
| 1981 | cagttcaatc agatctatgg cctggtggga gtattgacag tggcaatttt ccacctgtag |
| 2041 | ctataccagc cagactccct gaaaggcgct acattgagaa catttaccat tccaaaccaa |
| 2101 | tgagatggcc atttttctta ttcattcctt tctttattat tttctgtgta ctgattgcta |
| 2161 | taatggtgaa agttaatttc caaaggaaaa aatggagaac tgaggactat tcaagcgatg |
| 2221 | agcaacctga aagtgagagt gaacctaaag ggtagtctgg acaacagaga tgccatgata |
| 2281 | tcacttcttc tagagtaatt atctgtgatg gatggacaca aaaaaatgga aagaaaagaa |
| 2341 | tgtacattac ctggtttcct gggattcaaa cctgcatatt gtgattttaa tttgaccaga |
| 2401 | aaatatgata tatatgtata atttcacaga taatttactt atttaaaaat gcatgataat |
| 2461 | gagttttaca ttacaaattt ctgttttttt aaagttatct tacgctattt ctgttggtta |
| 2521 | gtagacacta attctgtcag taggggcatg gtataaggaa atatcataat gtaatgaggt |
| 2581 | ggtactatga ttaaaagcca ctgttacatt tcaaaaaaaa aaaaaaa |
| ICAM1 (NCBI Ref.: NM_000201.2; SEQ ID NO: 177) | |
| 1 | caagcttagc ctggccggga aacgggaggc gtggaggccg ggagcagccc ccggggtcat |
| 61 | cgccctgcca ccgccgcccg attgctttag cttggaaatt ccggagctga agcggccagc |
| 121 | gagggaggat gaccctctcg gcccgggcac cctgtcagtc cggaaataac tgcagcattt |
| 181 | gttccggagg ggaaggcgcg aggtttccgg gaaagcagca ccgccccttg gcccccaggt |
| 241 | ggctagcgct ataaaggatc acgcgcccca gtcgacgctg agctcctctg ctactcagag |
| 301 | ttgcaacctc agcctcgcta tggctcccag cagcccccgg cccgcgctgc ccgcactcct |
| 361 | ggtcctgctc ggggctctgt tcccaggacc tggcaatgcc cagacatctg tgtccccctc |
| 421 | aaaagtcatc ctgccccggg gaggctccgt gctggtgaca tgcagcacct cctgtgacca |
| 481 | gcccaagttg ttgggcatag agaccccgtt gcctaaaaag gagttgctcc tgcctgggaa |
| 541 | caaccggaag gtgtatgaac tgagcaatgt gcaagaagat agccaaccaa tgtgctattc |
| 601 | aaactgccct gatgggcagt caacagctaa aaccttcctc accgtgtact ggactccaga |
| 661 | acgggtggaa ctggcacccc tcccctcttg gcagccagtg ggcaagaacc ttaccctacg |
| 721 | ctgccaggtg gagggtgggg caccccgggc caacctcacc gtggtgctgc tccgtgggga |
| 781 | gaaggagctg aaacgggagc cagctgtggg ggagcccgct gaggtcacga ccacggtgct |
| 841 | ggtgaggaga gatcaccatg gagccaattt ctcgtgccgc actgaactgg acctgcggcc |
| 901 | ccaagggctg gagctgtttg agaacacctc ggccccctac cagctccaga cctttgtcct |
| 961 | gccagcgact cccccacaac ttgtcagccc ccgggtccta gaggtggaca cgcaggggac |
| 1021 | cgtggtctgt tccctggacg ggctgttccc agtctcggag gcccaggtcc acctggcact |
| 1081 | gggggaccag aggttgaacc ccacagtcac ctatggcaac gactccttct cggccaaggc |
| 1141 | ctcagtcagt gtgaccgcag aggacgaggg cacccagcgg ctgacgtgtg cagtaatact |
| 1201 | ggggaaccag agccaggaga cactgcagac agtgaccatc tacagctttc cggcgcccaa |
| 1261 | cgtgattctg acgaagccag aggtctcaga agggaccgag gtgacagtga agtgtgaggc |
| 1321 | ccaccctaga gccaaggtga cgctgaatgg ggttccagcc cagccactgg gcccgagggc |
| 1381 | ccagctcctg ctgaaggcca ccccagagga caacgggcgc agcttctcct gctctgcaac |
| 1441 | cctggaggtg gccggccagc ttatacacaa gaaccagacc cgggagcttc gtgtcctgta |
| 1501 | tggcccccga ctggacgaga gggattgtcc gggaaactgg acgtggccag aaaattccca |
| 1561 | gcagactcca atgtgccagg cttgggggaa cccattgccc gagctcaagt gtctaaagga |
| 1621 | tggcactttc ccactgccca tcggggaatc agtgactgtc actcgagatc ttgagggcac |
| 1681 | ctacctctgt cgggccagga gcactcaagg ggaggtcacc cgcaaggtga ccgtgaatgt |
| 1741 | gctctccccc cggtatgaga ttgtcatcat cactgtggta gcagccgcag tcataatggg |
| 1801 | cactgcaggc ctcagcacgt acctctataa ccgccagcgg aagatcaaga aatacagact |
| 1861 | acaacaggcc caaaaaggga cccccatgaa accgaacaca caagccacgc ctccctgaac |
| 1921 | ctatcccggg acagggcctc ttcctcggcc ttcccatatt ggtggcagtg gtgccacact |
| 1981 | gaacagagtg gaagacatat gccatgcagc tacacctacc ggccctggga cgccggagga |
| 2041 | cagggcattg tcctcagtca gatacaacag catttggggc catggtacct gcacacctaa |
| 2101 | aacactaggc cacgcatctg atctgtagtc acatgactaa gccaagagga aggagcaaga |
| 2161 | ctcaagacat gattgatgga tgttaaagtc tagcctgatg agaggggaag tggtggggga |
| 2221 | gacatagccc caccatgagg acatacaact gggaaatact gaaacttgct gcctattggg |
| 2281 | tatgctgagg ccccacagac ttacagaaga agtggccctc catagacatg tgtagcatca |
| 2341 | aaacacaaag gcccacactt cctgacggat gccagcttgg gcactgctgt ctactgaccc |
| 2401 | caacccttga tgatatgtat ttattcattt gttattttac cagctattta ttgagtgtct |
| 2461 | tttatgtagg ctaaatgaac ataggtctct ggcctcacgg agctcccagt cctaatcaca |
| 2521 | ttcaaggtca ccaggtacag ttgtacaggt tgtacactgc aggagagtgc ctggcaaaaa |
| 2581 | gatcaaatgg ggctgggact tctcattggc caacctgcct ttccccagaa ggagtgattt |
| 2641 | ttctatcggc acaaaagcac tatatggact ggtaatggtt acaggttcag agattaccca |
| 2701 | gtgaggcctt attcctccct tccccccaaa actgacacct ttgttagcca cctccccacc |
| 2761 | cacatacatt tctgccagtg ttcacaatga cactcagcgg tcatgtctgg acatgagtgc |
| 2821 | ccagggaata tgcccaagct atgccttgtc ctcttgtcct gtttgcattt cactgggagc |
| 2881 | ttgcactatg cagctccagt ttcctgcagt gatcagggtc ctgcaagcag tggggaaggg |
| 2941 | ggccaaggta ttggaggact ccctcccagc tttggaagcc tcatccgcgt gtgtgtgtgt |
| 3001 | gtgtatgtgt agacaagctc tcgctctgtc acccaggctg gagtgcagtg gtgcaatcat |
| 3061 | ggttcactgc agtcttgacc ttttgggctc aagtgatcct cccacctcag cctcctgagt |
| 3121 | agctgggacc ataggctcac aacaccacac ctggcaaatt tgattttttt tttttttcca |
| 3181 | gagacggggt ctcgcaacat tgcccagact tcctttgtgt tagttaataa agctttctca |
| 3241 | actgccaaa |
| Collagen (NCBI Ref.: NM_000088.3; SEQ ID NO: 178) | |
| 1 | tcgtcggagc agacgggagt ttctcctcgg ggtcggagca ggaggcacgc ggagtgtgag |
| 61 | gccacgcatg agcggacgct aaccccctcc ccagccacaa agagtctaca tgtctagggt |
| 121 | ctagacatgt tcagctttgt ggacctccgg ctcctgctcc tcttagcggc caccgccctc |
| 181 | ctgacgcacg gccaagagga aggccaagtc gagggccaag acgaagacat cccaccaatc |
| 241 | acctgcgtac agaacggcct caggtaccat gaccgagacg tgtggaaacc cgagccctgc |
| 301 | cggatctgcg tctgcgacaa cggcaaggtg ttgtgcgatg acgtgatctg tgacgagacc |
| 361 | aagaactgcc ccggcgccga agtccccgag ggcgagtgct gtcccgtctg ccccgacggc |
| 421 | tcagagtcac ccaccgacca agaaaccacc ggcgtcgagg gacccaaggg agacactggc |
| 481 | ccccgaggcc caaggggacc cgcaggcccc cctggccgag atggcatccc tggacagcct |
| 541 | ggacttcccg gaccccccgg accccccgga cctcccggac cccctggcct cggaggaaac |
| 601 | tttgctcccc agctgtctta tggctatgat gagaaatcaa ccggaggaat ttccgtgcct |
| 661 | ggccccatgg gtccctctgg tcctcgtggt ctccctggcc cccctggtgc acctggtccc |
| 721 | caaggcttcc aaggtccccc tggtgagcct ggcgagcctg gagcttcagg tcccatgggt |
| 781 | ccccgaggtc ccccaggtcc ccctggaaag aatggagatg atggggaagc tggaaaacct |
| 841 | ggtcgtcctg gtgagcgtgg gcctcctggg cctcagggtg ctcgaggatt gcccggaaca |
| 901 | gctggcctcc ctggaatgaa gggacacaga ggtttcagtg gtttggatgg tgccaaggga |
| 961 | gatgctggtc ctgctggtcc taagggtgag cctggcagcc ctggtgaaaa tggagctcct |
| 1021 | ggtcagatgg gcccccgtgg cctgcctggt gagagaggtc gccctggagc ccctggccct |
| 1081 | gctggtgctc gtggaaatga tggtgctact ggtgctgccg ggccccctgg tcccaccggc |
| 1141 | cccgctggtc ctcctggctt ccctggtgct gttggtgcta agggtgaagc tggtccccaa |
| 1201 | gggccccgag gctctgaagg tccccagggt gtgcgtggtg agcctggccc ccctggccct |
| 1261 | gctggtgctg ctggccctgc tggaaaccct ggtgctgatg gacagcctgg tgctaaaggt |
| 1321 | gccaatggtg ctcctggtat tgctggtgct cctggcttcc ctggtgcccg aggcccctct |
| 1381 | ggaccccagg gccccggcgg ccctcctggt cccaagggta acagcggtga acctggtgct |
| 1441 | cctggcagca aaggagacac tggtgctaag ggagagcctg gccctgttgg tgttcaagga |
| 1501 | ccccctggcc ctgctggaga ggaaggaaag cgaggagctc gaggtgaacc cggacccact |
| 1561 | ggcctgcccg gaccccctgg cgagcgtggt ggacctggta gccgtggttt ccctggcgca |
| 1621 | gatggtgttg ctggtcccaa gggtcccgct ggtgaacgtg gttctcctgg ccctgctggc |
| 1681 | cccaaaggat ctcctggtga agctggtcgt cccggtgaag ctggtctgcc tggtgccaag |
| 1741 | ggtctgactg gaagccctgg cagccctggt cctgatggca aaactggccc ccctggtccc |
| 1801 | gccggtcaag atggtcgccc cggaccccca ggcccacctg gtgcccgtgg tcaggctggt |
| 1861 | gtgatgggat tccctggacc taaaggtgct gctggagagc ccggcaaggc tggagagcga |
| 1921 | ggtgttcccg gaccccctgg cgctgtcggt cctgctggca aagatggaga ggctggagct |
| 1981 | cagggacccc ctggccctgc tggtcccgct ggcgagagag gtgaacaagg ccctgctggc |
| 2041 | tcccccggat tccagggtct ccctggtcct gctggtcctc caggtgaagc aggcaaacct |
| 2101 | ggtgaacagg gtgttcctgg agaccttggc gcccctggcc cctctggagc aagaggcgag |
| 2161 | agaggtttcc ctggcgagcg tggtgtgcaa ggtccccctg gtcctgctgg tccccgaggg |
| 2221 | gccaacggtg ctcccggcaa cgatggtgct aagggtgatg ctggtgcccc tggagctccc |
| 2281 | ggtagccagg gcgcccctgg ccttcaggga atgcctggtg aacgtggtgc agctggtctt |
| 2341 | ccagggccta agggtgacag aggtgatgct ggtcccaaag gtgctgatgg ctctcctggc |
| 2401 | aaagatggcg tccgtggtct gactggcccc attggtcctc ctggccctgc tggtgcccct |
| 2461 | ggtgacaagg gtgaaagtgg tcccagcggc cctgctggtc ccactggagc tcgtggtgcc |
| 2521 | cccggagacc gtggtgagcc tggtcccccc ggccctgctg gctttgctgg cccccctggt |
| 2581 | gctgacggcc aacctggtgc taaaggcgaa cctggtgatg ctggtgctaa aggcgatgct |
| 2641 | ggtccccctg gccctgccgg acccgctgga ccccctggcc ccattggtaa tgttggtgct |
| 2701 | cctggagcca aaggtgctcg cggcagcgct ggtccccctg gtgctactgg tttccctggt |
| 2761 | gctgctggcc gagtcggtcc tcctggcccc tctggaaatg ctggaccccc tggccctcct |
| 2821 | ggtcctgctg gcaaagaagg cggcaaaggt ccccgtggtg agactggccc tgctggacgt |
| 2881 | cctggtgaag ttggtccccc tggtccccct ggccctgctg gcgagaaagg atcccctggt |
| 2941 | gctgatggtc ctgctggtgc tcctggtact cccgggcctc aaggtattgc tggacagcgt |
| 3001 | ggtgtggtcg gcctgcctgg tcagagagga gagagaggct tccctggtct tcctggcccc |
| 3061 | tctggtgaac ctggcaaaca aggtccctct ggagcaagtg gtgaacgtgg tccccctggt |
| 3121 | cccatgggcc cccctggatt ggctggaccc cctggtgaat ctggacgtga gggggctcct |
| 3181 | ggtgccgaag gttcccctgg acgagacggt tctcctggcg ccaagggtga ccgtggtgag |
| 3241 | accggccccg ctggaccccc tggtgctcct ggtgctcctg gtgcccctgg ccccgttggc |
| 3301 | cctgctggca agagtggtga tcgtggtgag actggtcctg ctggtcccgc cggtcctgtc |
| 3361 | ggccctgttg gcgcccgtgg ccccgccgga ccccaaggcc cccgtggtga caagggtgag |
| 3421 | acaggcgaac agggcgacag aggcataaag ggtcaccgtg gcttctctgg cctccagggt |
| 3481 | ccccctggcc ctcctggctc tcctggtgaa caaggtccct ctggagcctc tggtcctgct |
| 3541 | ggtccccgag gtccccctgg ctctgctggt gctcctggca aagatggact caacggtctc |
| 3601 | cctggcccca ttgggccccc tggtcctcgc ggtcgcactg gtgatgctgg tcctgttggt |
| 3661 | ccccccggcc ctcctggacc tcctggtccc cctggtcctc ccagcgctgg tttcgacttc |
| 3721 | agcttcctgc cccagccacc tcaagagaag gctcacgatg gtggccgcta ctaccgggct |
| 3781 | gatgatgcca atgtggttcg tgaccgtgac ctcgaggtgg acaccaccct caagagcctg |
| 3841 | agccagcaga tcgagaacat ccggagccca gagggcagcc gcaagaaccc cgcccgcacc |
| 3901 | tgccgtgacc tcaagatgtg ccactctgac tggaagagtg gagagtactg gattgacccc |
| 3961 | aaccaaggct gcaacctgga tgccatcaaa gtcttctgca acatggagac tggtgagacc |
| 4021 | tgcgtgtacc ccactcagcc cagtgtggcc cagaagaact ggtacatcag caagaacccc |
| 4081 | aaggacaaga ggcatgtctg gttcggcgag agcatgaccg atggattcca gttcgagtat |
| 4141 | ggcggccagg gctccgaccc tgccgatgtg gccatccagc tgaccttcct gcgcctgatg |
| 4201 | tccaccgagg cctcccagaa catcacctac cactgcaaga acagcgtggc ctacatggac |
| 4261 | cagcagactg gcaacctcaa gaaggccctg ctcctccagg gctccaacga gatcgagatc |
| 4321 | cgcgccgagg gcaacagccg cttcacctac agcgtcactg tcgatggctg cacgagtcac |
| 4381 | accggagcct ggggcaagac agtgattgaa tacaaaacca ccaagacctc ccgcctgccc |
| 4441 | atcatcgatg tggccccctt ggacgttggt gccccagacc aggaattcgg cttcgacgtt |
| 4501 | ggccctgtct gcttcctgta aactccctcc atcccaacct ggctccctcc cacccaacca |
| 4561 | actttccccc caacccggaa acagacaagc aacccaaact gaaccccctc aaaagccaaa |
| 4621 | aaatgggaga caatttcaca tggactttgg aaaatatttt tttcctttgc attcatctct |
| 4681 | caaacttagt ttttatcttt gaccaaccga acatgaccaa aaaccaaaag tgcattcaac |
| 4741 | cttaccaaaa aaaaaaaaaa aaaaagaata aataaataac tttttaaaaa aggaagcttg |
| 4801 | gtccacttgc ttgaagaccc atgcgggggt aagtcccttt ctgcccgttg ggcttatgaa |
| 4861 | accccaatgc tgccctttct gctcctttct ccacaccccc cttggggcct cccctccact |
| 4921 | ccttcccaaa tctgtctccc cagaagacac aggaaacaat gtattgtctg cccagcaatc |
| 4981 | aaaggcaatg ctcaaacacc caagtggccc ccaccctcag cccgctcctg cccgcccagc |
| 5041 | acccccaggc cctgggggac ctggggttct cagactgcca aagaagcctt gccatctggc |
| 5101 | gctcccatgg ctcttgcaac atctcccctt cgtttttgag ggggtcatgc cgggggagcc |
| 5161 | accagcccct cactgggttc ggaggagagt caggaagggc cacgacaaag cagaaacatc |
| 5221 | ggatttgggg aacgcgtgtc aatcccttgt gccgcagggc tgggcgggag agactgttct |
| 5281 | gttccttgtg taactgtgtt gctgaaagac tacctcgttc ttgtcttgat gtgtcaccgg |
| 5341 | ggcaactgcc tgggggcggg gatgggggca gggtggaagc ggctccccat tttataccaa |
| 5401 | aggtgctaca tctatgtgat gggtggggtg gggagggaat cactggtgct atagaaattg |
| 5461 | agatgccccc ccaggccagc aaatgttcct ttttgttcaa agtctatttt tattccttga |
| 5521 | tatttttctt tttttttttt tttttttgtg gatggggact tgtgaatttt tctaaaggtg |
| 5581 | ctatttaaca tgggaggaga gcgtgtgcgg ctccagccca gcccgctgct cactttccac |
| 5641 | cctctctcca cctgcctctg gcttctcagg cctctgctct ccgacctctc tcctctgaaa |
| 5701 | ccctcctcca cagctgcagc ccatcctccc ggctccctcc tagtctgtcc tgcgtcctct |
| 5761 | gtccccgggt ttcagagaca acttcccaaa gcacaaagca gtttttcccc ctaggggtgg |
| 5821 | gaggaagcaa aagactctgt acctattttg tatgtgtata ataatttgag atgtttttaa |
| 5881 | ttattttgat tgctggaata aagcatgtgg aaatgaccca aacataa |
| E-cadherin (NCBI Ref.: NM_001317184.1; SEQ ID NO: 179) | |
| 1 | tcagtggcgt cggaactgca aagcacctgt gagcttgcgg aagtcagttc agactccagc |
| 61 | ccgctccagc ccggcccgac ccgaccgcac ccggcgcctg ccctcgctcg gcgtccccgg |
| 121 | ccagccatgg gcccttggag ccgcagcctc tcggcgctgc tgctgctgct gcaggtctcc |
| 181 | tcttggctct gccaggagcc ggagccctgc caccctggct ttgacgccga gagctacacg |
| 241 | ttcacggtgc cccggcgcca cctggagaga ggccgcgtcc tgggcagagt gaattttgaa |
| 301 | gattgcaccg gtcgacaaag gacagcctat ttttccctcg acacccgatt caaagtgggc |
| 361 | acagatggtg tgattacagt caaaaggcct ctacggtttc ataacccaca gatccatttc |
| 421 | ttggtctacg cctgggactc cacctacaga aagttttcca ccaaagtcac gctgaataca |
| 481 | gtggggcacc accaccgccc cccgccccat caggcctccg tttctggaat ccaagcagaa |
| 541 | ttgctcacat ttcccaactc ctctcctggc ctcagaagac agaagagaga ctgggttatt |
| 601 | cctcccatca gctgcccaga aaatgaaaaa ggcccatttc ctaaaaacct ggttcagatc |
| 661 | aaatccaaca aagacaaaga aggcaaggtt ttctacagca tcactggcca aggagctgac |
| 721 | acaccccctg ttggtgtctt tattattgaa agagaaacag gatggctgaa ggtgacagag |
| 781 | cctctggata gagaacgcat tgccacatac actctcttct ctcacgctgt gtcatccaac |
| 841 | gggaatgcag ttgaggatcc aatggagatt ttgatcacgg taaccgatca gaatgacaac |
| 901 | aagcccgaat tcacccagga ggtctttaag gggtctgtca tggaaggtgc tcttccagga |
| 961 | acctctgtga tggaggtcac agccacagac gcggacgatg atgtgaacac ctacaatgcc |
| 1021 | gccatcgctt acaccatcct cagccaagat cctgagctcc ctgacaaaaa tatgttcacc |
| 1081 | attaacagga acacaggagt catcagtgtg gtcaccactg ggctggaccg agagagtttc |
| 1141 | cctacgtata ccctggtggt tcaagctgct gaccttcaag gtgaggggtt aagcacaaca |
| 1201 | gcaacagctg tgatcacagt cactgacacc aacgataatc ctccgatctt caatcccacc |
| 1261 | acgggcttgg attttgaggc caagcagcag tacattctac acgtagcagt gacgaatgtg |
| 1321 | gtaccttttg aggtctctct caccacctcc acagccaccg tcaccgtgga tgtgctggat |
| 1381 | gtgaatgaag cccccatctt tgtgcctcct gaaaagagag tggaagtgtc cgaggacttt |
| 1441 | ggcgtgggcc aggaaatcac atcctacact gcccaggagc cagacacatt tatggaacag |
| 1501 | aaaataacat atcggatttg gagagacact gccaactggc tggagattaa tccggacact |
| 1561 | ggtgccattt ccactcgggc tgagctggac agggaggatt ttgagcacgt gaagaacagc |
| 1621 | acgtacacag ccctaatcat agctacagac aatggttctc cagttgctac tggaacaggg |
| 1681 | acacttctgc tgatcctgtc tgatgtgaat gacaacgccc ccataccaga acctcgaact |
| 1741 | atattcttct gtgagaggaa tccaaagcct caggtcataa acatcattga tgcagacctt |
| 1801 | cctcccaata catctccctt cacagcagaa ctaacacacg gggcgagtgc caactggacc |
| 1861 | attcagtaca acgacccaac ccaagaatct atcattttga agccaaagat ggccttagag |
| 1921 | gtgggtgact acaaaatcaa tctcaagctc atggataacc agaataaaga ccaagtgacc |
| 1981 | accttagagg tcagcgtgtg tgactgtgaa ggggccgctg gcgtctgtag gaaggcacag |
| 2041 | cctgtcgaag caggattgca aattcctgcc attctgggga ttcttggagg aattcttgct |
| 2101 | ttgctaattc tgattctgct gctcttgctg tttcttcgga ggagagcggt ggtcaaagag |
| 2161 | cccttactgc ccccagagga tgacacccgg gacaacgttt attactatga tgaagaagga |
| 2221 | ggcggagaag aggaccagga ctttgacttg agccagctgc acaggggcct ggacgctcgg |
| 2281 | cctgaagtga ctcgtaacga cgttgcacca accctcatga gtgtcccccg gtatcttccc |
| 2341 | cgccctgcca atcccgatga aattggaaat tttattgatg aaaatctgaa agcggctgat |
| 2401 | actgacccca cagccccgcc ttatgattct ctgctcgtgt ttgactatga aggaagcggt |
| 2461 | tccgaagctg ctagtctgag ctccctgaac tcctcagagt cagacaaaga ccaggactat |
| 2521 | gactacttga acgaatgggg caatcgcttc aagaagctgg ctgacatgta cggaggcggc |
| 2581 | gaggacgact aggggactcg agagaggcgg gccccagacc catgtgctgg gaaatgcaga |
| 2641 | aatcacgttg ctggtggttt ttcagctccc ttcccttgag atgagtttct ggggaaaaaa |
| 2701 | aagagactgg ttagtgatgc agttagtata gctttatact ctctccactt tatagctcta |
| 2761 | ataagtttgt gttagaaaag tttcgactta tttcttaaag cttttttttt tttcccatca |
| 2821 | ctctttacat ggtggtgatg tccaaaagat acccaaattt taatattcca gaagaacaac |
| 2881 | tttagcatca gaaggttcac ccagcacctt gcagattttc ttaaggaatt ttgtctcact |
| 2941 | tttaaaaaga aggggagaag tcagctactc tagttctgtt gttttgtgta tataattttt |
| 3001 | taaaaaaaat ttgtgtgctt ctgctcatta ctacactggt gtgtccctct gccttttttt |
| 3061 | tttttttaag acagggtctc attctatcgg ccaggctgga gtgcagtggt gcaatcacag |
| 3121 | ctcactgcag ccttgtcctc ccaggctcaa gctatccttg cacctcagcc tcccaagtag |
| 3181 | ctgggaccac aggcatgcac cactacgcat gactaatttt ttaaatattt gagacggggt |
| 3241 | ctccctgtgt tacccaggct ggtctcaaac tcctgggctc aagtgatcct cccatcttgg |
| 3301 | cctcccagag tattgggatt acagacatga gccactgcac ctgcccagct ccccaactcc |
| 3361 | ctgccatttt ttaagagaca gtttcgctcc atcgcccagg cctgggatgc agtgatgtga |
| 3421 | tcatagctca ctgtaacctc aaactctggg gctcaagcag ttctcccacc agcctccttt |
| 3481 | ttattttttt gtacagatgg ggtcttgcta tgttgcccaa gctggtctta aactcctggc |
| 3541 | ctcaagcaat ccttctgcct tggcccccca aagtgctggg attgtgggca tgagctgctg |
| 3601 | tgcccagcct ccatgtttta atatcaactc tcactcctga attcagttgc tttgcccaag |
| 3661 | ataggagttc tctgatgcag aaattattgg gctcttttag ggtaagaagt ttgtgtcttt |
| 3721 | gtctggccac atcttgacta ggtattgtct actctgaaga cctttaatgg cttccctctt |
| 3781 | tcatctcctg agtatgtaac ttgcaatggg cagctatcca gtgacttgtt ctgagtaagt |
| 3841 | gtgttcatta atgtttattt agctctgaag caagagtgat atactccagg acttagaata |
| 3901 | gtgcctaaag tgctgcagcc aaagacagag cggaactatg aaaagtgggc ttggagatgg |
| 3961 | caggagagct tgtcattgag cctggcaatt tagcaaactg atgctgagga tgattgaggt |
| 4021 | gggtctacct catctctgaa aattctggaa ggaatggagg agtctcaaca tgtgtttctg |
| 4081 | acacaagatc cgtggtttgt actcaaagcc cagaatcccc aagtgcctgc ttttgatgat |
| 4141 | gtctacagaa aatgctggct gagctgaaca catttgccca attccaggtg tgcacagaaa |
| 4201 | accgagaata ttcaaaattc caaatttttt tcttaggagc aagaagaaaa tgtggcccta |
| 4261 | aagggggtta gttgaggggt agggggtagt gaggatcttg atttggatct ctttttattt |
| 4321 | aaatgtgaat ttcaactttt gacaatcaaa gaaaagactt ttgttgaaat agctttactg |
| 4381 | tttctcaagt gttttggaga aaaaaatcaa ccctgcaatc actttttgga attgtcttga |
| 4441 | tttttcggca gttcaagcta tatcgaatat agttctgtgt agagaatgtc actgtagttt |
| 4501 | tgagtgtata catgtgtggg tgctgataat tgtgtatttt ctttgggggt ggaaaaggaa |
| 4561 | aacaattcaa gctgagaaaa gtattctcaa agatgcattt ttataaattt tattaaacaa |
| 4621 | ttttgttaaa ccattaaaaa aaaaaaaaaa aaaaaaaaaa aa |
| Laminin (LAMA1) (NCBI Ref.: NM_005559.3; SEQ ID NO: 180) | |
| 1 | cggggccagg gcagcgcgga ctcgcgtccc gtggagcgtt ccaggcgggc gcgcggcttt |
| 61 | ctccccagac ccaccgagtg gcggcggagg cgagatgcgc gggggcgtgc tcctggtctt |
| 121 | gctgctgtgt gtcgccgcgc agtgccggca gagaggcctg tttcctgcca ttctcaatct |
| 181 | tgccagcaat gctcacatca gcaccaatgc cacctgtggc gagaaggggc cggagatgtt |
| 241 | ctgcaaactt gtggagcatg tgccaggtcg gcccgtccga aacccacagt gccggatctg |
| 301 | tgatggcaac agcgcaaacc ccagagaacg ccatccaata tcacatgcca tagatggcac |
| 361 | caataactgg tggcaaagtc ccagcattca gaatgggaga gaatatcact gggtcacaat |
| 421 | cactctggac ttaagacagg tctttcaagt tgcatatgtc atcattaaag ctgccaatgc |
| 481 | ccctcgacct ggaaactgga ttttggagcg ttctctggat ggcaccacgt tcagcccctg |
| 541 | gcagtattat gcagtcagcg actcagagtg tttgtctcgt tacaatataa ctccaagacg |
| 601 | agggccaccc acctacaggg ctgatgatga agtgatctgc acctcctatt attccagatt |
| 661 | ggtgccactt gagcatggag agattcatac atcactcatc aatggcagac caagcgctga |
| 721 | cgatctttca cccaagttgt tggaattcac ttctgcacga tatattcgcc ttcgcttgca |
| 781 | acgcattaga acgctcaatg cagatctcat gacccttagc caccgggaac ctaaagaact |
| 841 | ggatcctatt gttaccagac gctattatta ttcaataaag gacatttctg ttggaggcat |
| 901 | gtgtatctgc tatggccatg ctagtagctg cccatgggat gaaactacaa agaaactgca |
| 961 | gtgtcaatgt gagcataata cttgcgggga gagctgtaac aggtgctgtc ctgggtacca |
| 1021 | tcagcagccc tggaggccgg gaaccgtgtc ctccggcaat acatgtgaag catgtaattg |
| 1081 | tcacaataaa gccaaagact gttactatga tgaaagtgtt gcaaagcaga agaaaagttt |
| 1141 | gaatactgct ggacagttca gaggaggagg ggtttgcata aattgcttgc agaacaccat |
| 1201 | gggaatcaac tgtgaaacct gtattgatgg atattataga ccacacaaag tgtctcctta |
| 1261 | tgaggatgag ccttgccgcc cctgtaattg tgaccctgtg gggtccctca gttctgtctg |
| 1321 | tattaaggat gacctccatt ctgacttaca caatgggaag cagccaggtc agtgcccatg |
| 1381 | taaggaaggt tatacaggag aaaaatgtga tcgctgccaa cttggctata aggattaccc |
| 1441 | gacctgtgtc tcctgtgggt gcaacccagt gggcagtgcc agtgatgagc cctgcacagg |
| 1501 | gccctgtgtt tgtaaggaaa acgttgaggg gaaggcctgt gatcgctgca agccaggatt |
| 1561 | ctataacttg aaggaaaaaa acccccgggg ctgctccgag tgcttctgct ttggcgtttc |
| 1621 | tgatgtctgc agcagcctct cttggcctgt tggtcaggta aacagtatgt ccgggtggct |
| 1681 | ggtcaccgac ttgatcagtc ccaggaagat cccgtctcag caagatgcac taggcgggcg |
| 1741 | ccatcaggtc agcatcaaca acaccgcggt catgcagaga ctggctccca agtactactg |
| 1801 | ggcagccccc gaggcctacc ttggaaataa gctgactgcg tttggcggat tcctgaaata |
| 1861 | cacggtgtcc tacgatattc cggtagagac ggtagacagt aacctcatgt cgcatgctga |
| 1921 | cgtcatcatt aagggaaacg gactcacttt aagcacacag gctgagggtc tgtcattgca |
| 1981 | gccttatgaa gagtacctaa acgtggttag acttgtgcct gaaaacttcc aagattttca |
| 2041 | cagcaaaagg cagattgatc gtgaccagct gatgactgtc cttgccaatg tgacacatct |
| 2101 | tttgatcaga gccaactaca attctgcaaa aatggctctt tacaggttgg agtccgtctc |
| 2161 | tctggacata gccagctcta atgccatcga cctggtggtg gccgctgatg tggagcactg |
| 2221 | tgaatgtccg caaggctaca cagggacctc ctgtgagtcg tgcctctctg gctattaccg |
| 2281 | cgtggatgga atactctttg gaggaatttg tcaaccctgt gaatgccacg gccatgcagc |
| 2341 | tgagtgtaat gttcacggcg tttgcattgc gtgtgcgcac aacaccaccg gcgtccactg |
| 2401 | tgagcagtgc ttgcccggct tctacgggga gccttcccga gggacacctg gggactgcca |
| 2461 | gccctgcgcc tgccctctca ccatagcctc caacaatttc agccccacct gccacctcaa |
| 2521 | tgatggagat gaagtggtct gtgactggtg tgccccgggc tactcaggag cttggtgtga |
| 2581 | gagatgtgca gatggttact atggaaaccc aacagtgcct ggcgaatctt gtgttccctg |
| 2641 | tgactgcagc ggcaacgtgg acccctcgga ggctggtcac tgtgactcag tcaccgggga |
| 2701 | gtgcctgaag tgcctgggga acacagatgg cgcccactgt gaaaggtgtg ctgacgggtt |
| 2761 | ctatggggac gctgtgacag ccaagaactg ccgcgcctgt gaatgccatg tgaaaggctc |
| 2821 | ccattctgcc gtgtgccatc ttgagaccgg gctctgtgac tgcaaaccaa acgtgactgg |
| 2881 | acagcagtgt gaccagtgct tgcatggcta ttatgggctg gactcaggcc atggctgccg |
| 2941 | gccctgcaac tgcagcgtgg caggctccgt gtcagatggc tgcacggatg aaggccagtg |
| 3001 | tcactgtgtc ccaggtgtgg cagggaaaag gtgtgacagg tgtgcccatg gcttctacgc |
| 3061 | ctaccaggat ggtagctgta caccctgtga ctgcccacac actcagaata cctgcgaccc |
| 3121 | agaaactgga gagtgtgtct gcccccctca cacacagggt gtgaagtgtg aagaatgtga |
| 3181 | ggatgggcac tggggctacg atgcggaggt ggggtgccag gcctgcaatt gcagtctcgt |
| 3241 | ggggtcgact catcatcggt gcgatgtggt caccggccat tgccagtgca agtcaaaatt |
| 3301 | tggtggccgg gcctgcgatc agtgttcctt gggttacaga gactttcccg actgtgttcc |
| 3361 | ctgtgactgt gacctgaggg ggacgtcggg ggacgcctgc aacctggagc agggtctctg |
| 3421 | cggctgtgtg gaggaaaccg gggcctgccc ttgcaaggaa aatgtctttg gtcctcagtg |
| 3481 | caacgaatgt cgagagggca ccttcgctct ccgcgcagac aaccccctgg gctgcagccc |
| 3541 | gtgcttctgc tccgggctgt cccacctctg ctcagagctg gaggactacg tgaggacccc |
| 3601 | agtaacgctg ggctccgatc agcctcttct gcgtgtggtt tctcagagta acttgagggg |
| 3661 | cacgaccgag ggggtttact accaggcccc cgacttcctg ctggatgccg ccaccgtccg |
| 3721 | gcagcacatc cgtgcagagc cgttttactg gcggctgccg cagcagttcc aaggagacca |
| 3781 | gctcatggcc tatggtggca aactgaagta cagcgtggcc ttctattctt tggatggcgt |
| 3841 | cggcacctcc aattttgagc ctcaagttct catcaaaggt ggtcggatca gaaagcaagt |
| 3901 | catttacatg gatgcaccag ccccagagaa tggagtgaga caggaacaag aagtagcaat |
| 3961 | gagagagaat ttttggaaat attttaactc tgtttctgaa aaacctgtca cgcgagagga |
| 4021 | ttttatgtct gtcctcagcg atattgagta catcctcatc aaggcatcgt atggtcaagg |
| 4081 | attacagcag agcagaatct cagacatttc aatggaggtt ggcagaaagg ctgaaaagct |
| 4141 | gcacccagaa gaagaggttg catctctttt agagaattgt gtctgtcctc ctggcactgt |
| 4201 | gggattctca tgtcaggact gcgcccctgg gtaccacaga gggaagctcc cagcagggag |
| 4261 | tgacagggga ccacgccctc tggttgctcc ttgtgttccc tgcagttgca acaaccacag |
| 4321 | tgacacctgt gaccccaaca ccgggaagtg tctgaactgt ggcgataaca cagcaggtga |
| 4381 | ccattgtgat gtgtgtactt ctggctacta cgggaaggtg actggctcag caagtgactg |
| 4441 | tgctctgtgt gcctgtcctc acagccctcc tgccagtttt agtcccactt gtgtcttgga |
| 4501 | aggggaccac gatttccgtt gtgacgcctg tctcctgggc tatgaaggaa aacactgtga |
| 4561 | aaggtgctcc tcaagctatt atgggaaccc tcaaacacca ggtggcagtt gccagaagtg |
| 4621 | tgactgcaac ccgcacggct ctgtccacgg tgactgtgac cgcacatctg ggcagtgcgt |
| 4681 | ttgcaggctg ggggcctcgg ggctccggtg cgatgagtgt gaaccgaggc acattctgat |
| 4741 | ggaaacagat tgtgtttcct gtgatgatga gtgtgtaggt gtgctgctga atgacttgga |
| 4801 | tgagattggt gatgccgttc tttctctgaa cctcactggc attatccctg tcccatatgg |
| 4861 | aattttgtca aacctggaaa atacaactaa atatctccag gaatctttat taaaagaaaa |
| 4921 | tatgcaaaag gacctgggaa aaattaagct tgaaggtgtt gcagaagaaa cggacaacct |
| 4981 | gcaaaagaag ctcactagga tgttagcgag tacccaaaag gtgaataggg caactgagag |
| 5041 | aatcttcaag gagagtcaag acctggccat agccattgag aggctgcaga tgagcatcac |
| 5101 | agaaattatg gaaaagacaa ctttaaatca gactttggat gaagatttcc tactacccaa |
| 5161 | ttctactctt cagaacatgc aacagaatgg tacatctttg ctagaaatca tgcagataag |
| 5221 | agacttcaca cagttgcacc aaaatgccac ccttgaactc aaggctgctg aagatttatt |
| 5281 | gtcacaaatt caggaaaatt accagaagcc gctggaagaa ttggaggtat tgaaagaagc |
| 5341 | agcaagccac gtcctttcaa agcacaacaa tgaactaaag gcggctgagg cgctcgtgag |
| 5401 | ggaagctgag gcaaagatgc aggaaagcaa ccacctgctg ctcatggtca atgctaatct |
| 5461 | gagagaattc agtgataaaa agctgcatgt tcaagaagaa caaaatctga cctcagagct |
| 5521 | cattgtccaa ggaagaggat tgatagatgc tgctgctgca caaacagatg ctgtacaaga |
| 5581 | tgctctagag cacttagagg atcaccagga taagctactt ttatggtctg ccaaaatcag |
| 5641 | gcaccacata gatgacctgg tcatgcacat gtcccaaagg aacgcagtcg acctggtcta |
| 5701 | cagagctgag gaccatgccg ctgagttcca gagactagca gatgttctgt acagtggcct |
| 5761 | tgaaaacatc agaaatgtgt ccctgaatgc caccagtgca gcctatgtcc attacaacat |
| 5821 | ccagagcctg attgaagaat cggaggaact ggccagagat gctcacagga ctgtgactga |
| 5881 | gacgagcctg ctctcagaat cccttgtttc taacgggaaa gcggccgtgc agcgcagctc |
| 5941 | cagatttcta aaagaaggca acaacctcag caggaagctt ccaggtattg cattggaact |
| 6001 | gagtgaattg agaaataaga caaacagatt tcaagagaat gctgttgaaa ttaccaggca |
| 6061 | aaccaatgaa tcactcttga tacttagagc aattcctaaa ggtataagag acaagggagc |
| 6121 | caaaaccaaa gagctggcca cgtctgcaag ccagagcgcg gtgagcacgc tgagggacgt |
| 6181 | ggcggggctg agccaggagc tgctgaacac atctgccagc ctgtccaggg tcaacaccac |
| 6241 | attacgagag acacaccagc ttctgcagga ctccaccatg gccactctgt tggctggaag |
| 6301 | aaaagtcaaa gacgtggaaa ttcaagccaa ccttttgttt gatcggttga agcctttgaa |
| 6361 | gatgttagag gagaatctga gcagaaacct atcagaaatt aaactgttga tcagccaggc |
| 6421 | ccgcaaacaa gcagcttcta ttaaagtcgc cgtgtctgca gacagagatt gcatccgggc |
| 6481 | ctaccagcct cagatttcct ctaccaacta caatacctta acactaaatg ttaagacaca |
| 6541 | ggaacccgat aatcttctct tctacctcgg tagcagcacc gcttctgatt tccttgcagt |
| 6601 | ggagatgcgg cgagggagag tggccttcct gtgggacctg ggctccgggt ccacacgctt |
| 6661 | ggagtttcca gactttccca ttgatgacaa cagatggcac agtatccatg tagccagatt |
| 6721 | tggaaacatt ggttcactga gtgtaaagga aatgagctca aatcaaaagt caccaacaaa |
| 6781 | aacaagtaaa tcccctggga cagctaatgt tctggatgta aacaattcaa cactcatgtt |
| 6841 | tgttggaggt cttggaggac aaatcaagaa atctcctgct gtgaaggtta ctcattttaa |
| 6901 | aggctgcttg ggggaggcct tcctgaatgg aaaatccata ggcctatgga actatattga |
| 6961 | aagggaaggc aagtgccgtg ggtgcttcgg aagctcccag aatgaagacc cttccttcca |
| 7021 | ttttgacggg agtgggtact ctgtcgtgga gaagtcactt ccggctaccg tgacccagat |
| 7081 | aatcatgctt tttaatacct tttcacctaa tggacttctt ctctacctgg gttcatacgg |
| 7141 | cacaaaagac tttttatcca tcgagctgtt tcgtggcaga gtgaaggtta tgactgacct |
| 7201 | gggttcagga cccattaccc ttttgacaga cagacgttat aacaatggaa cctggtacaa |
| 7261 | aattgccttc cagcgaaacc ggaagcaagg agtgctagca gttatcgatg cctataacac |
| 7321 | cagtaataaa gaaaccaagc agggcgagac tccgggagca tcttctgacc tcaaccgcct |
| 7381 | agacaaggac ccgatttatg tgggtggatt accaaggtca agagttgtaa ggagaggtgt |
| 7441 | caccaccaaa agctttgtgg gctgcatcaa gaacctggaa atatccagat caacctttga |
| 7501 | cttactcaga aattcctatg gagtgagaaa aggctgttta ctggagccca tccggagtgt |
| 7561 | tagcttcctg aaaggcggct acattgaatt gccacccaaa tctttgtcac cagaatcaga |
| 7621 | atggctggta acatttgcca ccacgaacag cagtggcatc atcctggctg ccctcggcgg |
| 7681 | ggatgtggag aagcggggtg atcgtgagga agcacacgtg cccttctttt ccgtcatgct |
| 7741 | gatcggaggc aacattgagg tacatgtcaa tcctggggat gggacaggcc tgagaaaagc |
| 7801 | tctcctgcac gctcccacgg gtacctgcag tgatggacaa gcgcattcca tctccttggt |
| 7861 | caggaatcgg agaattatca ctgtccaatt ggatgagaac aatcctgtgg aaatgaagtt |
| 7921 | gggcacatta gtagaaagca ggacgataaa tgtgtccaat ctgtacgtcg ggggaattcc |
| 7981 | agagggagag gggacgtcac tgctcacaat gagaagatcg ttccatggct gtatcaaaaa |
| 8041 | cctgatcttc aatttggaac ttttggattt caacagtgca gttggccatg agcaagtcga |
| 8101 | cctggacacc tgctggctgt cagaaaggcc taagctggct cccgatgcag aggacagcaa |
| 8161 | gctcttgcca gagccccggg cttttccaga acagtgtgtg gtggatgcag ctctggagta |
| 8221 | cgttcccggc gctcaccagt ttggtctcac acaaaacagc catttcatct tgccttttaa |
| 8281 | tcagtcggct gtcagaaaga agctctcggt tgagctaagc atccgcacgt tcgcctccag |
| 8341 | cggcctgatt tactacatgg ctcatcagaa ccaagcagac tacgctgtgc tccagctgca |
| 8401 | cgggggccgc ctccacttca tgtttgacct tggcaaaggc agaacaaagg tctctcaccc |
| 8461 | tgcactgctc agtgatggca agtggcacac ggtcaagaca gactatgtta aaagaaaagg |
| 8521 | cttcataact gtcgacggcc gagagtctcc catggtgact gtggtgggag atggaaccat |
| 8581 | gctggatgtg gagggtttgt tctacctagg aggcctgccc tcccagtacc aggccaggaa |
| 8641 | aattggaaat atcacccaca gcatccctgc ctgcattggg gatgtgacgg ttaacagcaa |
| 8701 | acagctggac aaggacagcc cggtgtctgc cttcacggtg aacaggtgct acgcagtggc |
| 8761 | ccaggaagga acatactttg acggaagcgg atatgcagct cttgtcaaag agggctacaa |
| 8821 | agtccagtca gatgtgaaca tcacactgga gtttcgaacc tcctcgcaga atggcgtcct |
| 8881 | cctggggatc agcactgcca aagtggatgc cattggacta gagcttgtgg acggcaaggt |
| 8941 | cttgttccat gtcaacaatg gtgctggcag gataacagct gcatatgagc ccaaaaccgc |
| 9001 | cactgtgctc tgtgatggaa aatggcacac tcttcaagct aacaaaagca aacaccgtat |
| 9061 | cactctgatt gttgacggga acgcagttgg cgctgaaagt ccacacaccc agtctacctc |
| 9121 | agtggacacc aacaatccca tttatgttgg tggctatcct gctggtgtga agcaaaaatg |
| 9181 | cctgcgcagc cagacctcgt tccgcgggtg tttgaggaag ctagctctga ttaagagccc |
| 9241 | gcaggtgcag tcctttgact tcagcagagc gttcgaactg cacggagttt tccttcattc |
| 9301 | ctgtcctggg accgagtcct gaacttcaag cagaatcctc agttggaatc attgctaata |
| 9361 | ttttgaggag aagtgtatgt gtgaattaag aatctcttca gttcatattt catttccaac |
| 9421 | tcaggttaag tgtttctggg gagagatgtt gtgtttacgt tacactaaaa ccacatgtgc |
| 9481 | aacaaatacc tccattaaat ggtctaaaat gtaaattgaa ttccctggct ctctttttaa |
| 9541 | acgtattttt aaaaaaatct ttatacacat tgaatgttct gttgattact tgatagtatt |
| 9601 | ttatgttttt cattttgagc tttttaaaaa agtatcaata cagatgataa cagatca |
| Fibulin-5 (NCBI Ref.: NM_006329.3; SEQ ID NO: 181) | |
| 1 | cgcccctcgc cttctgcccg ggcgctcgca gccgagcgcg gccggggaag ggctctcctc |
| 61 | ccagcgccga gcactgggcc ctggcagacg ccccaagatt gttgtgagga gtctagccag |
| 121 | ttggtgagcg ctgtaatctg aaccagctgt gtccagactg aggccccatt tgcattgttt |
| 181 | aacatactta gaaaatgaag tgttcatttt taacattcct cctccaattg gtttaatgct |
| 241 | gaattactga agagggctaa gcaaaaccag gtgcttgcgc tgagggctct gcagtggctg |
| 301 | ggaggacccc ggcgctctcc ccgtgtcctc tccacgactc gctcggcccc tctggaataa |
| 361 | aacacccgcg agccccgagg gcccagagga ggccgacgtg cccgagctcc tccgggggtc |
| 421 | ccgcccgcga gctttcttct cgccttcgca tctcctcctc gcgcgtcttg gacatgccag |
| 481 | gaataaaaag gatactcact gttaccattc tggctctctg tcttccaagc cctgggaatg |
| 541 | cacaggcaca gtgcacgaat ggctttgacc tggatcgcca gtcaggacag tgtttagata |
| 601 | ttgatgaatg ccgaaccatc cccgaggcct gccgaggaga catgatgtgt gttaaccaaa |
| 661 | atggcgggta tttatgcatt ccccggacaa accctgtgta tcgagggccc tactcgaacc |
| 721 | cctactcgac cccctactca ggtccgtacc cagcagctgc cccaccactc tcagctccaa |
| 781 | actatcccac gatctccagg cctcttatat gccgctttgg ataccagatg gatgaaagca |
| 841 | accaatgtgt ggatgtggac gagtgtgcaa cagattccca ccagtgcaac cccacccaga |
| 901 | tctgcatcaa tactgaaggc gggtacacct gctcctgcac cgacggatat tggcttctgg |
| 961 | aaggccagtg cttagacatt gatgaatgtc gctatggtta ctgccagcag ctctgtgcga |
| 1021 | atgttcctgg atcctattct tgtacatgca accctggttt taccctcaat gaggatggaa |
| 1081 | ggtcttgcca agatgtgaac gagtgtgcca ccgagaaccc ctgcgtgcaa acctgcgtca |
| 1141 | acacctacgg ctctttcatc tgccgctgtg acccaggata tgaacttgag gaagatggcg |
| 1201 | ttcattgcag tgatatggac gagtgcagct tctctgagtt cctctgccaa catgagtgtg |
| 1261 | tgaaccagcc cggcacatac ttctgctcct gccctccagg ctacatcctg ctggatgaca |
| 1321 | accgaagctg ccaagacatc aacgaatgtg agcacaggaa ccacacgtgc aacctgcagc |
| 1381 | agacgtgcta caatttacaa gggggcttca aatgcattga ccccatccgc tgtgaggagc |
| 1441 | cttatctgag gatcagtgat aaccgctgta tgtgtcctgc tgagaaccct ggctgcagag |
| 1501 | accagccctt taccatcttg taccgggaca tggacgtggt gtcaggacgc tccgttcccg |
| 1561 | ctgacatctt ccaaatgcaa gccacgaccc gctaccctgg ggcctattac attttccaga |
| 1621 | tcaaatctgg gaatgagggc agagaatttt acatgcggca aacgggcccc atcagtgcca |
| 1681 | ccctggtgat gacacgcccc atcaaagggc cccgggaaat ccagctggac ttggaaatga |
| 1741 | tcactgtcaa cactgtcatc aacttcagag gcagctccgt gatccgactg cggatatatg |
| 1801 | tgtcgcagta cccattctga gcctcgggct ggagcctccg acgctgcctc tcattggcac |
| 1861 | caagggacag gagaagagag gaaataacag agagaatgag agcgacacag acgttaggca |
| 1921 | tttcctgctg aacgtttccc cgaagagtca gccccgactt cctgactctc acctgtacta |
| 1981 | ttgcagacct gtcaccctgc aggacttgcc acccccagtt cctatgacac agttatcaaa |
| 2041 | aagtattatc attgctcccc tgatagaaga ttgttggtga attttcaagg ccttcagttt |
| 2101 | atttccacta ttttcaaaga aaatagatta ggtttgcggg ggtctgagtc tatgttcaaa |
| 2161 | gactgtgaac agcttgctgt cacttcttca cctcttccac tccttctctc actgtgttac |
| 2221 | tgctttgcaa agacccggga gctggcgggg aaccctggga gtagctagtt tgctttttgc |
| 2281 | gtacacagag aaggctatgt aaacaaacca cagcaggatc gaagggtttt tagagaatgt |
| 2341 | gtttcaaaac catgcctggt attttcaacc ataaaagaag tttcagttgt ccttaaattt |
| 2401 | gtataacggt ttaattctgt cttgttcatt ttgagtattt ttaaaaaata tgtcgtagaa |
| 2461 | ttccttcgaa aggccttcag acacatgcta tgttctgtct tcccaaaccc agtctcctct |
| 2521 | ccattttagc ccagtgtttt ctttgaggac cccttaatct tgctttcttt agaattttta |
| 2581 | cccaattgga ttggaatgca gaggtctcca aactgattaa atatttgaag agaaaaa |

[0775] An antisense nucleic acid molecule can be complementary to all or part of a non-coding region of the coding strand of a nucleotide sequence encoding a target integrin or a target integrin ligand (e.g., any of the exemplary target integrins or any of the exemplary integrin ligands described herein). Non-coding regions (5′ and 3′ untranslated regions) are the 5′ and 3′ sequences that flank the coding region in a gene and are not translated into amino acids.

[0776] Based upon the sequences disclosed herein, one of skill in the art can easily choose and synthesize any of a number of appropriate antisense nucleic acids to target a nucleic acid encoding a target integrin (e.g., any of the exemplary target integrins described herein) or a nucleic acid encoding an integrin ligands (e.g., any of the exemplary integrin ligands described herein). Antisense nucleic acids targeting a nucleic acid encoding a target integrin (e.g., any of the exemplary integrins described herein) or a nucleic acid encoding an integrin ligand (e.g., any of the exemplary integrin ligands described herein) can be designed using the software available at the Integrated DNA Technologies website.

[0777] An antisense nucleic acid can be, for example, about 5, 10, 15, 20, 25, 30, 35, 40, 45, or 50 nucleotides or more in length. An antisense oligonucleotide can be constructed using chemical synthesis and enzymatic ligation reactions using procedures known in the art. For example, an antisense nucleic acid can be chemically synthesized using naturally occurring nucleotides or variously modified nucleotides designed to increase the biological stability of the molecules or to increase the physical stability of the duplex formed between the antisense and sense nucleic acids, e.g., phosphorothioate derivatives and acridine substituted nucleotides can be used.

[0778] Examples of modified nucleotides which can be used to generate an antisense nucleic acid include 5-fluorouracil, 5-bromouracil, 5-chlorouracil, 5-iodouracil, hypoxanthine, xanthine, 4-acetylcytosine, 5-(carboxyhydroxylmethyl) uracil, 5-carboxymethylaminomethyl-2-thiouridine, 5-carboxymethylaminomethyluracil, dihydrouracil, beta-D-galactosylqueosine, inosine, N6-isopentenyladenine, 1-methylguanine, 1-methylinosine, 2,2-dimethylguanine, 2-methyladenine, 2-methylguanine, 3-methylcytosine, 5-methylcytosine, N6-adenine, 7-methylguanine, 5-methylaminomethyluracil, 5-methoxyaminomethyl-2-thiouracil, beta-D-mannosylqueosine, 5′-methoxycarboxymethyluracil, 5-methoxyuracil, 2-methylthio-N6-isopentenyladenine, uracil-5-oxyacetic acid (v), wybutoxosine, pseudouracil, queosine, 2-thiocytosine, 5-methyl-2-thiouracil, 2-thiouracil, 4-thiouracil, 5-methyluracil, uracil-5-oxyacetic acid methylester, uracil-5-oxyacetic acid (v), 5-methyl-2-thiouracil, 3-(3-amino-3-N-2-carboxypropyl) uracil, (acp3)w, and 2,6-diaminopurine. Alternatively, the antisense nucleic acid can be produced biologically using an expression vector into which a nucleic acid has been subcloned in an antisense orientation (i.e., RNA transcribed from the inserted nucleic acid will be of an antisense orientation to a target nucleic acid of interest).

[0779] The antisense nucleic acid molecules described herein can be prepared in vitro and administered to a mammal, e.g., a human. Alternatively, they can be generated in situ such that they hybridize with or bind to cellular mRNA and/or genomic DNA encoding a target integrin (e.g., any of the exemplary target integrins described herein) or encoding a integrin ligand (e.g., any of the exemplary integrin ligands described herein) to thereby inhibit expression, e.g., by inhibiting transcription and/or translation. The hybridization can be by conventional nucleotide complementarities to form a stable duplex, or, for example, in the case of an antisense nucleic acid molecule that binds to DNA duplexes, through specific interactions in the major groove of the double helix. The antisense nucleic acid molecules can be delivered to a mammalian cell using a vector (e.g., a lentivirus, a retrovirus, or an adenovirus vector).

[0780] An antisense nucleic acid can be an α-anomeric nucleic acid molecule. An α-anomeric nucleic acid molecule forms specific double-stranded hybrids with complementary RNA in which, contrary to the usual, 0-units, the strands run parallel to each other (Gaultier et al., Nucleic Acids Res. 15:6625-6641, 1987). The antisense nucleic acid can also comprise a 2′-O-methylribonucleotide (Inoue et al., Nucleic Acids Res. 15:6131-6148, 1987) or a chimeric RNA-DNA analog (Inoue et al., FEBS Lett. 215:327-330, 1987).

[0781] Exemplary integrin inhibitors that are antisense nucleic acids include ATL1102 (e.g., Limmroth et al., Neurology 83(20):1780-1788, 2014; Li et al., Dig. Liver Dis. 39(6):557-565, 2007; Goto et al., Inflamm. Bowel Dis. 12(8):758-765, 2006).

[0782] Another example of an inhibitory nucleic acid is a ribozyme that has specificity for a nucleic acid encoding a target integrin (e.g., any of the exemplary target integrins described herein) or an integrin ligand (e.g., any of the exemplary integrin ligands described herein). Ribozymes are catalytic RNA molecules with ribonuclease activity that are capable of cleaving a single-stranded nucleic acid, such as an mRNA, to which they have a complementary region. Thus, ribozymes (e.g., hammerhead ribozymes (described in Haselhoff and Gerlach, Nature 334:585-591, 1988)) can be used to catalytically cleave mRNA transcripts to thereby inhibit translation of the protein encoded by the mRNA. A ribozyme having specificity for a target integrin (e.g., any of the exemplary target integrins described herein) or an integrin ligand (e.g., any of the exemplary integrin ligands described herein) can be designed based upon the nucleotide sequence of any of the integrin mRNA sequences or integrin ligand mRNA sequences disclosed herein or known in the art. For example, a derivative of a Tetrahymena L-19 IVS RNA can be constructed in which the nucleotide sequence of the active site is complementary to the nucleotide sequence to be cleaved in a target integrin mRNA or an integrin ligand mRNA (see, e.g., U.S. Pat. Nos. 4,987,071 and 5,116,742). Alternatively, an integrin mRNA (e.g., any of the exemplary integrin mRNAs described herein) or an integrin ligand mRNA (e.g., any of the exemplary integrin ligand mRNAs described herein) can be used to select a catalytic RNA having a specific ribonuclease activity from a pool of RNA molecules. See, e.g., Bartel et al., Science 261:1411-1418, 1993.

[0783] An inhibitory nucleic acid can also be a nucleic acid molecule that forms triple helical structures. For example, expression of a target integrin (e.g., any of the exemplary target integrins described herein) or an integrin ligand (e.g., any of the exemplary integrin ligands described herein) can be inhibited by targeting nucleotide sequences complementary to the regulatory region of the gene encoding the target integrin (e.g., any of the exemplary target integrins described herein) or the integrin ligand (e.g., any of the exemplary integrin ligands described herein) (e.g., the promoter and/or enhancer, e.g., a sequence that is at least 1 kb, 2 kb, 3 kb, 4 kb, or 5 kb upstream of the transcription initiation start state) to form triple helical structures that prevent transcription of the gene in target cells. See generally Helene, Anticancer Drug Des. 6(6):569-84, 1991; Helene, Ann. N.Y. Acad. Sci. 660:27-36, 1992; and Maher, Bioassays 14(12):807-15, 1992.

[0784] In various embodiments, inhibitory nucleic acids can be modified at the base moiety, sugar moiety, or phosphate backbone to improve, e.g., the stability, hybridization, or solubility of the molecule. For example, the deoxyribose phosphate backbone of the nucleic acids can be modified to generate peptide nucleic acids (see, e.g., Hyrup et al., Bioorganic Medicinal Chem. 4(1):5-23, 1996). Peptide nucleic acids (PNAs) are nucleic acid mimics, e.g., DNA mimics, in which the deoxyribose phosphate backbone is replaced by a pseudopeptide backbone and only the four natural nucleobases are retained. The neutral backbone of PNAs allows for specific hybridization to DNA and RNA under conditions of low ionic strength. The synthesis of PNA oligomers can be performed using standard solid phase peptide synthesis protocols (see, e.g., Perry-O'Keefe et al., Proc. Nat. Acad. Sci. U.S.A. 93:14670-675, 1996). PNAs can be used as antisense or antigene agents for sequence-specific modulation of gene expression by, e.g., inducing transcription or translation arrest or inhibiting replication.

[0785] PNAs can be modified, e.g., to enhance their stability or cellular uptake, by attaching lipophilic or other helper groups to PNA, by the formation of PNA-DNA chimeras, or by the use of liposomes or other techniques of drug delivery known in the art. For example, PNA-DNA chimeras can be generated which may combine the advantageous properties of PNA and DNA. Such chimeras allow DNA recognition enzymes, e.g., RNAse H and DNA polymerases, to interact with the DNA portion while the PNA portion would provide high binding affinity and specificity. PNA-DNA chimeras can be linked using linkers of appropriate lengths selected in terms of base stacking, number of bonds between the nucleobases, and orientation.

[0786] The synthesis of PNA-DNA chimeras can be performed as described in Finn et al., Nucleic Acids Res. 24:3357-63, 1996. For example, a DNA chain can be synthesized on a solid support using standard phosphoramidite coupling chemistry and modified nucleoside analogs. Compounds such as 5′-(4-methoxytrityl)amino-5′-deoxy-thymidine phosphoramidite can be used as a link between the PNA and the 5′ end of DNA (Mag et al., Nucleic Acids Res. 17:5973-88, 1989). PNA monomers are then coupled in a stepwise manner to produce a chimeric molecule with a 5′ PNA segment and a 3′ DNA segment (Finn et al., Nucleic Acids Res. 24:3357-63, 1996). Alternatively, chimeric molecules can be synthesized with a 5′ DNA segment and a 3′ PNA segment (Peterser et al., Bioorganic Med. Chem. Lett. 5:1119-11124, 1975).

[0787] In some embodiments, the inhibitory nucleic acids can include other appended groups such as peptides, or agents facilitating transport across the cell membrane (see, Letsinger et al., Proc. Nat. Acad. Sci. U.S.A. 86:6553-6556, 1989; Lemaitre et al., Proc. Nat. Acad. Sci. U.S.A. 84:648-652, 1989; and WO 88/09810). In addition, the inhibitory nucleic acids can be modified with hybridization-triggered cleavage agents (see, e.g., Krol et al., Bio/Techniques 6:958-976, 1988) or intercalating agents (see, e.g., Zon, Pharm. Res., 5:539-549, 1988). To this end, the oligonucleotide may be conjugated to another molecule, e.g., a peptide, hybridization triggered cross-linking agent, transport agent, hybridization-triggered cleavage agent, etc.

[0788] Another means by which expression of a target integrin (e.g., any of the exemplary target integrins described herein) mRNA or an integrin ligand (e.g., any of the exemplary integrin ligands described herein) mRNA can be decreased in a mammalian cell is by RNA interference (RNAi). RNAi is a process in which mRNA is degraded in host cells. To inhibit an mRNA, double-stranded RNA (dsRNA) corresponding to a portion of the gene to be silenced (e.g., a gene encoding a target integrin (e.g., any of the exemplary target integrins described herein) or an integrin ligand (e.g., any of the exemplary integrin ligands described herein)) is introduced into a mammalian cell. The dsRNA is digested into 21-23 nucleotide-long duplexes called short interfering RNAs (or siRNAs), which bind to a nuclease complex to form what is known as the RNA-induced silencing complex (or RISC). The RISC targets the homologous transcript by base pairing interactions between one of the siRNA strands and the endogenous mRNA. It then cleaves the mRNA about 12 nucleotides from the 3′ terminus of the siRNA (see Sharp et al., Genes Dev. 15:485-490, 2001, and Hammond et al., Nature Rev. Gen. 2:110-119, 2001).

[0789] RNA-mediated gene silencing can be induced in a mammalian cell in many ways, e.g., by enforcing endogenous expression of RNA hairpins (see, Paddison et al., Proc. Nat. Acad. Sci. U.S.A. 99:1443-1448, 2002) or, as noted above, by transfection of small (21-23 nt) dsRNA (reviewed in Caplen, Trends Biotech. 20:49-51, 2002). Methods for modulating gene expression with RNAi are described, e.g., in U.S. Pat. No. 6,506,559 and US 2003/0056235, which are hereby incorporated by reference.

[0790] Standard molecular biology techniques can be used to generate siRNAs. Short interfering RNAs can be chemically synthesized, recombinantly produced, e.g., by expressing RNA from a template DNA, such as a plasmid, or obtained from commercial vendors, such as Dharmacon. The RNA used to mediate RNAi can include synthetic or modified nucleotides, such as phosphorothioate nucleotides. Methods of transfecting cells with siRNA or with plasmids engineered to make siRNA are routine in the art.

[0791] The siRNA molecules used to decrease expression of a target integrin (e.g., any of the exemplary target integrins described herein) mRNA or an integrin ligand (e.g., any of the exemplary integrin ligands described herein) can vary in a number of ways. For example, they can include a 3′ hydroxyl group and strands of 21, 22, or 23 consecutive nucleotides. They can be blunt ended or include an overhanging end at either the 3′ end, the 5′ end, or both ends. For example, at least one strand of the RNA molecule can have a 3′ overhang from about 1 to about 6 nucleotides (e.g., 1-5, 1-3, 2-4, or 3-5 nucleotides (whether pyrimidine or purine nucleotides) in length. Where both strands include an overhang, the length of the overhangs may be the same or different for each strand.

[0792] To further enhance the stability of the RNA duplexes, the 3′ overhangs can be stabilized against degradation (by, e.g., including purine nucleotides, such as adenosine or guanosine nucleotides or replacing pyrimidine nucleotides by modified analogues (e.g., substitution of uridine 2-nucleotide 3′ overhangs by 2′-deoxythymidine is tolerated and does not affect the efficiency of RNAi). Any siRNA can be used in the methods of decreasing a target integrin (e.g., any of the exemplary target integrins described herein) mRNA or an integrin ligand (e.g., any of the exemplary integrin ligands described herein) mRNA, provided it has sufficient homology to the target of interest (e.g., a sequence present in any one of SEQ ID NOs: 132-158, e.g., a target sequence encompassing the translation start site or the first exon of the mRNA). There is no upper limit on the length of the siRNA that can be used (e.g., the siRNA can range from about 21 base pairs of the gene to the full length of the gene or more (e.g., about 20 to about 30 base pairs, about 50 to about 60 base pairs, about 60 to about 70 base pairs, about 70 to about 80 base pairs, about 80 to about 90 base pairs, or about 90 to about 100 base pairs).

[0793] As described herein, inhibitory nucleic acids preferentially bind (e.g., hybridize) to a nucleic acid encoding a target integrin (e.g., any of the exemplary target integrins described herein) or an integrin ligand (e.g., any of the exemplary integrin ligands described herein).

[0794] Non-limiting examples of integrin inhibitors that are short interfering RNAs (siRNAs) are described in Wang et al., Cancer Cell Int. 16:90, 2016). In some embodiments, the integrin inhibitor is a short hairpin RNA (shRNA).

[0795] Non-limiting examples of integrin inhibitors that are microRNA include miR-124 (Cai et al., Sci. Rep. 7:40733, 2017), miR-134 (Qin et al., Oncol. Rep. 37(2):823-830, 2017), miR-92b (Ma et al., Oncotarget 8(4):6681-6690, 2007), miR-17 (Gong et al., Oncol. Rep. 36(4), 2016), miR-338 (Chen et al., Oncol. Rep. 36(3):1467-74, 2016), and miR-30a-5p (Li et al., Int. J. Oncol. 48(3):1155-1164, 2016).

[0796] In some embodiments, the integrin inhibitor can include modified bases/locked nucleic acids (LNAs). In some embodiments, the integrin inhibitor is an aptamer (e.g., Berg et al., Mol. Ther. Nucl. Acids 5:e294, 2016; and Hussain et al., Nucleic Acid Ther. 23(3):203-212, 2013). Additional examples of integrin inhibitors that are inhibitory nucleic acids are described in Juliano et al., Theranostics 1:211-219, 2011; Millard et al., Theranostics 1:154-188, 2011; and Teoh et al., Curr. Mol. Med. 15:714-734, 2015. In some embodiments, the integrin inhibitor is an antisense nucleic acid, e.g., alicaforsen (Yacyshyn et al., Clin. Gastroenterol. Hepatol. 5(2):215-220, 2007).

[0797] In certain embodiments, a therapeutically effective amount of an inhibitory nucleic acid targeting a nucleic acid encoding a target integrin (e.g., any of the exemplary target integrins described herein) or an integrin ligand (e.g., any of the exemplary integrin ligands described herein) can be administered to a subject (e.g., a human subject) in need thereof.

[0798] In some embodiments, the inhibitory nucleic acid can be about 10 nucleotides to about 40 nucleotides (e.g., about 10 to about 30 nucleotides, about 10 to about 25 nucleotides, about 10 to about 20 nucleotides, about 10 to about 15 nucleotides, 10 nucleotides, 11 nucleotides, 12 nucleotides, 13 nucleotides, 14 nucleotides, 15 nucleotides, 16 nucleotides, 17 nucleotides, 18 nucleotides, 19 nucleotides, 20 nucleotides, 21 nucleotides, 22 nucleotides, 23 nucleotides, 24 nucleotides, 25 nucleotides, 26 nucleotides, 27 nucleotides, 28 nucleotides, 29 nucleotides, 30 nucleotides, 31 nucleotides, 32 nucleotides, 33 nucleotides, 34 nucleotides, 35 nucleotides, 36 nucleotides, 37 nucleotides, 38 nucleotides, 39 nucleotides, or 40 nucleotides) in length. One skilled in the art will appreciate that inhibitory nucleic acids may comprise at least one modified nucleic acid at either the 5′ or 3′end of DNA or RNA.

[0799] As is known in the art, the term “thermal melting point (Tm)” refers to the temperature, under defined ionic strength, pH, and inhibitory nucleic acid concentration, at which 50% of the inhibitory nucleic acids complementary to the target sequence hybridize to the target sequence at equilibrium. In some embodiments, an inhibitory nucleic acid can bind specifically to a target nucleic acid under stingent conditions, e.g., those in which the salt concentration is at least about 0.01 to 1.0 M Na ion concentration (or other salts) at pH 7.0 to 8.3 and the temperature is at least about 30° C. for short oligonucleotides (e.g., 10 to 50 nucleotide). Stringent conditions can also be achieved with the addition of destabilizing agents such as formamide.

[0800] In some embodiments of any of the inhibitory nucleic acids described herein, the inhibitory nucleic acid binds to a target nucleic acid (e.g., a nucleic acid encoding a target integrin, e.g., any of the exemplary target integrins described herein, or a nucleic acid encoding an integrin ligand, e.g., any of the exemplary integrin ligands described herein) with a Tₘ of greater than 20° C., greater than 22° C., greater than 24° C., greater than 26° C., greater than 28° C., greater than 30° C., greater than 32° C., greater than 34° C., greater than 36° C., greater than 38° C., greater than 40° C., greater than 42° C., greater than 44° C., greater than 46° C., greater than 48° C., greater than 50° C., greater than 52° C., greater than 54° C., greater than 56° C., greater than 58° C., greater than 60° C., greater than 62° C., greater than 64° C., greater than 66° C., greater than 68° C., greater than 70° C., greater than 72° C., greater than 74° C., greater than 76° C., greater than 78° C., or greater than 80° C., e.g., as measured in phosphate buffered saline using a UV spectrophotometer.

[0801] In some embodiments of any of the inhibitor nucleic acids described herein, the inhibitory nucleic acid binds to a target nucleic acid (e.g., a nucleic acid encoding a target integrin, e.g., any of the exemplary target integrins described herein, or a nucleic acid encoding an integrin ligand, e.g., any of the exemplary integrin ligands described herein) with a Tₘ of about 20° C. to about 80° C., about 78° C., about 76° C., about 74° C., about 72° C., about 70° C., about 68° C., about 66° C., about 64° C., about 62° C., about 60° C., about 58° C., about 56° C., about 54° C., about 52° C., about 50° C., about 48° C., about 46° C., about 44° C., about 42° C., about 40° C., about 38° C., about 36° C., about 34° C., about 32° C., about 30° C., about 28° C., about 26° C., about 24° C., or about 22° C. (inclusive); about 22° C. to about 80° C., about 78° C., about 76° C., about 74° C., about 72° C., about 70° C., about 68° C., about 66° C., about 64° C., about 62° C., about 60° C., about 58° C., about 56° C., about 54° C., about 52° C., about 50° C., about 48° C., about 46° C., about 44° C., about 42° C., about 40° C., about 38° C., about 36° C., about 34° C., about 32° C., about 30° C., about 28° C., about 26° C., or about 24° C. (inclusive); about 24° C. to about 80° C., about 78° C., about 76° C., about 74° C., about 72° C., about 70° C., about 68° C., about 66° C., about 64° C., about 62° C., about 60° C., about 58° C., about 56° C., about 54° C., about 52° C., about 50° C., about 48° C., about 46° C., about 44° C., about 42° C., about 40° C., about 38° C., about 36° C., about 34° C., about 32° C., about 30° C., about 28° C., or about 26° C. (inclusive); about 26° C. to about 80° C., about 78° C., about 76° C., about 74° C., about 72° C., about 70° C., about 68° C., about 66° C., about 64° C., about 62° C., about 60° C., about 58° C., about 56° C., about 54° C., about 52° C., about 50° C., about 48° C., about 46° C., about 44° C., about 42° C., about 40° C., about 38° C., about 36° C., about 34° C., about 32° C., about 30° C., or about 28° C. (inclusive); about 28° C. to about 80° C., about 78° C., about 76° C., about 74° C., about 72° C., about 70° C., about 68° C., about 66° C., about 64° C., about 62° C., about 60° C., about 58° C., about 56° C., about 54° C., about 52° C., about 50° C., about 48° C., about 46° C., about 44° C., about 42° C., about 40° C., about 38° C., about 36° C., about 34° C., about 32° C., or about 30° C. (inclusive); about 30° C. to about 80° C., about 78° C., about 76° C., about 74° C., about 72° C., about 70° C., about 68° C., about 66° C., about 64° C., about 62° C., about 60° C., about 58° C., about 56° C., about 54° C., about 52° C., about 50° C., about 48° C., about 46° C., about 44° C., about 42° C., about 40° C., about 38° C., about 36° C., about 34° C., or about 32° C. (inclusive); about 32° C. to about 80° C., about 78° C., about 76° C., about 74° C., about 72° C., about 70° C., about 68° C., about 66° C., about 64° C., about 62° C., about 60° C., about 58° C., about 56° C., about 54° C., about 52° C., about 50° C., about 48° C., about 46° C., about 44° C., about 42° C., about 40° C., about 38° C., about 36° C., or about 34° C. (inclusive); about 34° C. to about 80° C., about 78° C., about 76° C., about 74° C., about 72° C., about 70° C., about 68° C., about 66° C., about 64° C., about 62° C., about 60° C., about 58° C., about 56° C., about 54° C., about 52° C., about 50° C., about 48° C., about 46° C., about 44° C., about 42° C., about 40° C., about 38° C., or about 36° C. (inclusive); about 36° C. to about 80° C., about 78° C., about 76° C., about 74° C., about 72° C., about 70° C., about 68° C., about 66° C., about 64° C., about 62° C., about 60° C., about 58° C., about 56° C., about 54° C., about 52° C., about 50° C., about 48° C., about 46° C., about 44° C., about 42° C., about 40° C., or about 38° C. (inclusive); about 38° C. to about 80° C., about 78° C., about 76° C., about 74° C., about 72° C., about 70° C., about 68° C., about 66° C., about 64° C., about 62° C., about 60° C., about 58° C., about 56° C., about 54° C., about 52° C., about 50° C., about 48° C., about 46° C., about 44° C., about 42° C., or about 40° C. (inclusive); about 40° C. to about 80° C., about 78° C., about 76° C., about 74° C., about 72° C., about 70° C., about 68° C., about 66° C., about 64° C., about 62° C., about 60° C., about 58° C., about 56° C., about 54° C., about 52° C., about 50° C., about 48° C., about 46° C., about 44° C., or about 42° C. (inclusive); about 42° C. to about 80° C., about 78° C., about 76° C., about 74° C., about 72° C., about 70° C., about 68° C., about 66° C., about 64° C., about 62° C., about 60° C., about 58° C., about 56° C., about 54° C., about 52° C., about 50° C., about 48° C., about 46° C., or about 44° C. (inclusive); about 44° C. to about 80° C., about 78° C., about 76° C., about 74° C., about 72° C., about 70° C., about 68° C., about 66° C., about 64° C., about 62° C., about 60° C., about 58° C., about 56° C., about 54° C., about 52° C., about 50° C., about 48° C., or about 46° C. (inclusive); about 46° C. to about 80° C., about 78° C., about 76° C., about 74° C., about 72° C., about 70° C., about 68° C., about 66° C., about 64° C., about 62° C., about 60° C., about 58° C., about 56° C., about 54° C., about 52° C., about 50° C., or about 48° C. (inclusive); about 48° C. to about 80° C., about 78° C., about 76° C., about 74° C., about 72° C., about 70° C., about 68° C., about 66° C., about 64° C., about 62° C., about 60° C., about 58° C., about 56° C., about 54° C., about 52° C., or about 50° C. (inclusive); about 50° C. to about 80° C., about 78° C., about 76° C., about 74° C., about 72° C., about 70° C., about 68° C., about 66° C., about 64° C., about 62° C., about 60° C., about 58° C., about 56° C., about 54° C., or about 52° C. (inclusive); about 52° C. to about 80° C., about 78° C., about 76° C., about 74° C., about 72° C., about 70° C., about 68° C., about 66° C., about 64° C., about 62° C., about 60° C., about 58° C., about 56° C., or about 54° C. (inclusive); about 54° C. to about 80° C., about 78° C., about 76° C., about 74° C., about 72° C., about 70° C., about 68° C., about 66° C., about 64° C., about 62° C., about 60° C., about 58° C., or about 56° C. (inclusive); about 56° C. to about 80° C., about 78° C., about 76° C., about 74° C., about 72° C., about 70° C., about 68° C., about 66° C., about 64° C., about 62° C., about 60° C., or about 58° C. (inclusive); about 58° C. to about 80° C., about 78° C., about 76° C., about 74° C., about 72° C., about 70° C., about 68° C., about 66° C., about 64° C., about 62° C., or about 60° C. (inclusive); about 60° C. to about 80° C., about 78° C., about 76° C., about 74° C., about 72° C., about 70° C., about 68° C., about 66° C., about 64° C., or about 62° C. (inclusive); about 62° C. to about 80° C., about 78° C., about 76° C., about 74° C., about 72° C., about 70° C., about 68° C., about 66° C., or about 64° C. (inclusive); about 64° C. to about 80° C., about 78° C., about 76° C., about 74° C., about 72° C., about 70° C., about 68° C., or about 66° C. (inclusive); about 66° C. to about 80° C., about 78° C., about 76° C., about 74° C., about 72° C., about 70° C., or about 68° C. (inclusive); about 68° C. to about 80° C., about 78° C., about 76° C., about 74° C., about 72° C., or about 70° C. (inclusive); about 70° C. to about 80° C., about 78° C., about 76° C., about 74° C., or about 72° C. (inclusive); about 72° C. to about 80° C., about 78° C., about 76° C., or about 74° C. (inclusive); about 74° C. to about 80° C., about 78° C., or about 76° C. (inclusive); about 76° C. to about 80° C. or about 78° C. (inclusive); or about 78° C. to about 80° C. (inclusive),

[0802] In some embodiments, the inhibitory nucleic acid can be formulated in a nanoparticle (e.g., a nanoparticle including one or more synthetic polymers, e.g., Patil et al., Pharmaceutical Nanotechnol. 367:195-203, 2009; Yang et al., ACS Appl. Mater. Interfaces, doi: 10.1021/acsami.6b16556, 2017; Perepelyuk et al., Mol. Ther. Nucleic Acids 6:259-268, 2017). In some embodiments, the nanoparticle can be a mucoadhesive particle (e.g., nanoparticles having a positively-charged exterior surface) (Andersen et al., Methods Mol. Biol. 555:77-86, 2009). In some embodiments, the nanoparticle can have a neutrally-charged exterior surface.

[0803] In some embodiments, the inhibitory nucleic acid can be formulated, e.g., as a liposome (Buyens et al., J. Control Release 158(3): 362-370, 2012; Scarabel et al., Expert Opin. Drug Deliv. 17:1-14, 2017), a micelle (e.g., a mixed micelle) (Tangsangasaksri et al., BioMacromolecules 17:246-255, 2016; Wu et al., Nanotechnology, doi: 10.1088/1361-6528/aa6519, 2017), a microemulsion (WO 11/004395), a nanoemulsion, or a solid lipid nanoparticle (Sahay et al., Nature Biotechnol. 31:653-658, 2013; and Lin et al., Nanomedicine 9(1):105-120, 2014). Additional exemplary structural features of inhibitory nucleic acids and formulations of inhibitory nucleic acids are described in US 2016/0090598.

[0804] In some embodiments, a pharmaceutical composition can include a sterile saline solution and one or more inhibitory nucleic acid (e.g., any of the inhibitory nucleic acids described herein). In some examples, a pharmaceutical composition consists of a sterile saline solution and one or more inhibitory nucleic acid (e.g., any of the inhibitory nucleic acids described herein). In certain embodiments, the sterile saline is a pharmaceutical grade saline. In certain embodiments, a pharmaceutical composition can include one or more inhibitory nucleic acid (e.g., any of the inhibitory nucleic acids described herein) and sterile water. In certain embodiments, a pharmaceutical composition consists of one or more inhibitory nucleic acid (e.g., any of the inhibitory nucleic acids described herein) and sterile water. In certain embodiments, a pharmaceutical composition includes one or more inhibitory nucleic acid (e.g., any of the inhibitory nucleic acids described herein) and phosphate-buffered saline (PBS). In certain embodiments, a pharmaceutical composition consists of one or more inhibitory nucleic acids (e.g., any of the inhibitory nucleic acids described herein) and sterile phosphate-buffered saline (PBS). In some examples, the sterile saline is a pharmaceutical grade PBS.

[0805] In certain embodiments, one or more inhibitory nucleic acids (e.g., any of the inhibitory nucleic acids described herein) may be admixed with pharmaceutically acceptable active and/or inert substances for the preparation of pharmaceutical compositions or formulations. Compositions and methods for the formulation of pharmaceutical compositions depend on a number of criteria, including, but not limited to, route of administration, extent of disease, or dose to be administered.

[0806] Pharmaceutical compositions including one or more inhibitory nucleic acids encompass any pharmaceutically acceptable salts, esters, or salts of such esters. Non-limiting examples of pharmaceutical compositions include pharmaceutically acceptable salts of inhibitory nucleic acids. Suitable pharmaceutically acceptable salts include, but are not limited to, sodium and potassium salts.

[0807] Also provided herein are prodrugs that can include additional nucleosides at one or both ends of an inhibitory nucleic acid which are cleaved by endogenous nucleases within the body, to form the active inhibitory nucleic acid.

[0808] Lipid moieties can be used to formulate an inhibitory nucleic acid. In certain such methods, the inhibitory nucleic acid is introduced into preformed liposomes or lipoplexes made of mixtures of cationic lipids and neutral lipids. In certain methods, inhibitory nucleic acid complexes with mono- or poly-cationic lipids are formed without the presence of a neutral lipid. In certain embodiments, a lipid moiety is selected to increase distribution of an inhibitory nucleic acid to a particular cell or tissue in a mammal. In some examples, a lipid moiety is selected to increase distribution of an inhibitory nucleic acid to fat tissue in a mammal. In certain embodiments, a lipid moiety is selected to increase distribution of an inhibitory nucleic acid to muscle tissue.

[0809] In certain embodiments, pharmaceutical compositions provided herein comprise one or more inhibitory nucleic acid and one or more excipients. In certain such embodiments, excipients are selected from water, salt solutions, alcohol, polyethylene glycols, gelatin, lactose, amylase, magnesium stearate, talc, silicic acid, viscous paraffin, hydroxymethylcellulose and polyvinylpyrrolidone.

[0810] In some examples, a pharmaceutical composition provided herein includes liposomes and emulsions. Liposomes and emulsions can be used to formulate hydrophobic compounds. In some examples, certain organic solvents such as dimethylsulfoxide are used.

[0811] In some examples, a pharmaceutical composition provided herein includes one or more tissue-specific delivery molecules designed to deliver one or more inhibitory nucleic acids to specific tissues or cell types in a mammal. For example, a pharmaceutical composition can include liposomes coated with a tissue-specific antibody.

[0812] In some embodiments, a pharmaceutical composition provided herein can include a co-solvent system. Examples of such co-solvent systems include benzyl alcohol, a nonpolar surfactant, a water-miscible organic polymer, and an aqueous phase. A non-limiting example of such a co-solvent system is the VPD co-solvent system, which is a solution of absolute ethanol comprising 3% w/v benzyl alcohol, 8% w/v of the nonpolar surfactant Polysorbate 80™ and 65% w/v polyethylene glycol 300. As can be appreciated, other surfactants may be used instead of Polysorbate 80™; the fraction size of polyethylene glycol may be varied; other biocompatible polymers may replace polyethylene glycol, e.g., polyvinyl pyrrolidone; and other sugars or polysaccharides may substitute for dextrose.

[0813] In some examples, a pharmaceutical composition can be formulated for oral administration. In some examples, pharmaceutical compositions are formulated for buccal administration.

[0814] In some examples, a pharmaceutical composition is formulated for administration by injection (e.g., intravenous, subcutaneous, intramuscular, etc.). In some of these embodiments, a pharmaceutical composition includes a carrier and is formulated in aqueous solution, such as water or physiologically compatible buffers such as Hanks's solution, Ringer's solution, or physiological saline buffer. In some examples, other ingredients are included (e.g., ingredients that aid in solubility or serve as preservatives). In some examples, injectable suspensions are prepared using appropriate liquid carriers, suspending agents, and the like. Some pharmaceutical compositions for injection are formulated in unit dosage form, e.g., in ampoules or in multi-dose containers. Some pharmaceutical compositions for injection are suspensions, solutions, or emulsions in oily or aqueous vehicles, and may contain formulatory agents such as suspending, stabilizing, and/or dispersing agents. Solvents suitable for use in pharmaceutical compositions for injection include, but are not limited to, lipophilic solvents and fatty oils, such as sesame oil, synthetic fatty acid esters, such as ethyl oleate or triglycerides, and liposomes.

[0815] In certain embodiments, a therapeutically effective amount of an inhibitory nucleic acid targeting an integrin can be administered to a subject (e.g., a human subject) in need of thereof.

[0816] In certain embodiments, the inhibitory nucleic acids are 10 to 40 (e.g., 10 to 30, 10 to 25, 10 to 20, 10 to 15, 10, 11, 12, 13, 14, 15, 16, 17, 18, 19, 20, 21, 22, 23, 24, 25, 26, 27, 28, 29, 30, 31, 32, 33, 34, 35, 36, 37, 38, 39 or 40) nucleotides in length. One skilled in the art will appreciate that inhibitory nucleic acids may comprise at least one modified nucleic acid at either the 5′ or 3′end of the DNA or RNA.

### Antibodies

[0817] In some embodiments, the integrin inhibitor is an antibody or an antigen-binding fragment thereof (e.g., a Fab or a scFv). In some embodiments, the antibody can be a humanized antibody, a chimeric antibody, a multivalent antibody, or a fragment thereof. In some embodiments, an antibody can be a scFv-Fc, a VHH domain, a VNAR domain, a (scFv)₂, a minibody, or a BiTE. In some embodiments, an antibody can be a DVD-Ig, and a dual-affinity re-targeting antibody (DART), a triomab, kih IgG with a common LC, a crossmab, an ortho-Fab IgG, a 2-in-1-IgG, IgG-ScFv, scFv₂-Fc, a bi-nanobody, tanden antibody, a DART-Fc, a scFv-HAS-scFv, DNL-Fab3, DAF (two-in-one or four-in-one), DutaMab, DT-IgG, knobs-in-holes common LC, knobs-in-holes assembly, charge pair antibody, Fab-arm exchange antibody, SEEDbody, Triomab, LUZ-Y, Fcab, kλ-body, orthogonal Fab, DVD-IgG, IgG(H)-scFv, scFv-(H)IgG, IgG(L)-scFv, scFv-(L)-IgG, IgG (L,H)-Fc, IgG(H)-V, V(H)—IgG, IgG(L)-V, V(L)-IgG, KIH IgG-scFab, 2scFv-IgG, IgG-2scFv, scFv4-Ig, Zybody, DVI-IgG, nanobody, nanobody-HSA, a diabody, a TandAb, scDiabody, scDiabody-CH3, Diabody-CH3, Triple Body, miniantibody, minibody, TriBi minibody, scFv-CH3 KIH, Fab-scFv, scFv-CH-CL-scFv, F(ab′)₂-scFV₂, scFv-KIH, Fab-scFv-Fc, tetravalent HCAb, scDiabody-Fc, diabody-Fc, tandem scFv-Fc, intrabody, dock and lock bispecific antibody, ImmTAC, HSAbody, scDiabody-HAS, tandem scFv, IgG-IgG, Cov-X-Body, and scFv1-PEG-scFv2.

[0818] Non-limiting examples of an antigen-binding fragment of an antibody include an Fv fragment, a Fab fragment, a F(ab′)₂ fragment, and a Fab′ fragment. Additional examples of an antigen-binding fragment of an antibody is an antigen-binding fragment of an IgG (e.g., an antigen-binding fragment of IgG1, IgG2, IgG3, or IgG4) (e.g., an antigen-binding fragment of a human or humanized IgG, e.g., human or humanized IgG1, IgG2, IgG3, or IgG4); an antigen-binding fragment of an IgA (e.g., an antigen-binding fragment of IgA1 or IgA2) (e.g., an antigen-binding fragment of a human or humanized IgA, e.g., a human or humanized IgA1 or IgA2); an antigen-binding fragment of an IgD (e.g., an antigen-binding fragment of a human or humanized IgD); an antigen-binding fragment of an IgE (e.g., an antigen-binding fragment of a human or humanized IgE); or an antigen-binding fragment of an IgM (e.g., an antigen-binding fragment of a human or humanized IgM).

[0819] Any of the antibodies or antigen-binding fragments thereof described herein can bind to any of the integrins described herein or any of the integrin ligands described herein.

[0820] In some embodiments, the antibody is a pan-31 antibody (e.g., OS2966 (Carbonell et al., Cancer Res. 73(10):3145-3154, 2013). In some embodiments, the integrin antibody is a monoclonal antibody (e.g., 17E6 (Castel et al., Eur. J. Cell. Biol. 79(7):502-512, 2000); Mitjans et al., Int. J. Cancer 87(5):716-723, 2000)). In some embodiments, the monoclonal antibody is vedolizumab (e.g., Entyvio) or a variant thereof (Feagan et al., N. Engl. J. Med 369:699-710, 2013; Sandborn et al., N. Engl. J. Med. 369:711-721, 2013; Sands et al., Gastroenterology 147:618-627, 2014; and Milch et al., Neuroimmunol. 264:123-126, 2013; Wyant et al., J. Crohns Colitis 10(12):1437-1444, 2016; and Feagan et al., Gastroenterology 142(5):S160-S161, 2012).

[0821] In some embodiments, the antibody can be a Fab fragment of a monoclonal chimeric mouse-human antibody (e.g., abciximab (ReoPro, c7E3), Kononczuk et al., Curr. Drug Targets 16(13):1429-1437, 2015; Jiang et al., Appl. Microbiol. Biotechnol. 98(1):105-114, 2014), or a variant thereof. In some embodiments, the integrin antibody is a humanized monoclonal antibody. In some embodiments, the humanized monoclonal antibody is natalizumab (Tysabri®) (Targan et al., Gastroenterology 132(5):1672-1683, 2007; Sandborn et al., N. Engl. J. Med. 353(18):1912-1925, 2005; Nakamura et al., Intern Med. 56(2):211-214, 2017; Singh et al., J. Pediatr. Gastroenterol. Nutr. 62(6):863-866, 2016). In some embodiments, the humanized monoclonal antibody is vitaxin (MEDI-523) or a variant thereof (Huveneers et al., Int, J. Radiat. Biol. 81(11-12):743-751, 2007; Coleman et al., Circ. Res. 84(11):1268-1276, 1999). In some embodiments, the humanized monoclonal antibody is etaracizumab (Abegrin®, MEDI-522, LM609) or a variant thereof (Hersey et al., Cancer 116(6):1526-1534, 2010; Delbaldo et al., Invest New Drugs 26(1):35-43, 2008). In some embodiments, the humanized monoclonal antibody is CNTO95 (Intetumumab®) or a variant thereof (Jia et al., Anticancer Drugs 24(3):237-250, 2013; Heidenreich et al., Ann. Oncol. 24(2):329-336, 2013; Wu et al., J. Neurooncol. 110(1):27-36, 2012). In some embodiments, the humanized monoclonal antibody is efalizumab (Raptiva®) or a variant thereof (Krueger et al., J. Invest. Dermatol. 128(11):2615-2624, 2008; Li et al., PNAS 106(11):4349-4354, 2009; Woolacott et al., Health Technol. Assess 10:1-233, 2006). In some embodiments, the humanized monoclonal antibody is STX-100 (Stromedix®) or a variant thereof (van Aarsen et al., Cancer Res. 68:561-570, 2008; Lo et al., Am. J. Transplant. 13(12):3085-3093, 2013). In some embodiments, the humanized monoclonal antibody is 264RAD or a variant thereof (Eberlein et al., Oncogene 32(37):4406-4417, 2013).

[0822] In some embodiments, the humanized monoclonal antibody is rovelizumab or a variant thereof (Goodman et al., Trends Pharmacol. Sci 33:405-412, 2012). In some embodiments, the humanized monoclonal antibody is Cytolin® or a variant thereof (Rychert et al., Virology J. 10:120, 2013). In some embodiments, the humanized monoclonal antibody is etrolizumab or a variant thereof (Vermeire et al., Lancet 384:309-318, 2014; Rutgeerts et al., Gut 62:1122-1130, 2013; Lin et al., Gastroenterology 146:307-309, 2014; Ludviksson et al., J. Immunol. 162(8):4975-4982, 1999; Stefanich et al., Br. J. Pharmacol. 162(8):1855-1870, 2011). In some embodiments, the humanized monoclonal antibody is abrilumab (AMG 181; MEDI-7183) or a variant thereof (Pan et al., Br. J. Pharmacol. 169(1):51-68, 2013; Pan et al., Br. J. Clin. Pharmacol. 78(6):1315-1333, 2014). In some embodiments, the humanized monoclonal antibody is PF-00547659 (SHP647) or a variant thereof (Vermeire et al., Gut 60(8):1068-1075, 2011; Sandborn et al., Gastroenterology 1448(4):S-162, 2015). In some embodiments, the humanized monoclonal antibody is SAN-300 (hAQC2) or a variant thereof (Karpusas et al., J. Mol. Biol. 327:1031-1041, 2003). In some embodiments, the humanized monoclonal antibody is DI176E6 (EMD 5257) or a variant thereof (Goodman et al., Trends Pharmacol. Sci 33:405-412, 2012; and Sheridan et al., Nat. Biotech. 32:205-207, 2014).

[0823] In some embodiments, the integrin antibody is a chimeric monoclonal antibody. In some embodiments, the chimeric monoclonal antibody is volociximab or a variant thereof (Kuwada et al., Curr. Opin. Mol. Ther. 9(1):92-98, 2007; Ricart et al., Clin. Cancer Res. 14(23):7924-7929, 2008; Ramakrishnan et al., J. Exp. Ther. Oncol. 5(4):273-86, 2006; Bell-McGuinn et al., Gynecol. Oncol. 121:273-279, 2011; Almokadem et al., Exp. Opin. Biol. Ther. 12:251-7, 2012).

[0824] In some embodiments, the antibody specifically binds one or more (e.g., 1, 2, 3, 4, or 5) integrin. In some embodiments, the antibody specifically binds an integrin dimer (e.g., MLN-00002, MLNO2 (Feagan et al., Clin. Gastroenterol. Hepatol. 6(12):1370-1377, 2008; Feagan et al., N. Engl. J. Med. 352(24):2499-2507, 2005). In certain embodiments, the antibody comprises or consists of an antigen-binding fragment of abciximab (Reopro™) (Straub et al., Eur. J. Cardiothorac Surg. 27(4):617-621, 2005; Kim et al., Korean J. Intern. Med. 19(4):220-229, 2004). In some embodiments, the integrin inhibitor is an antibody-drug conjugate (e.g., IMGN388 (Bendell et al., EJC Suppl 8(7):152, 2010).

[0825] Further examples of antibodies and antigen-binding fragments thereof are described in U.S. Pat. Nos. 5,919,792; 6,214,834; 7,074,408; 6,833,373; 7,655,624; 7,465,449; 9,558,899; 7,659,374; 8,562,986; 8,398,975; and 8,853,149; US 2007/0117849; US 2009/0180951; US 2014/0349944; US 2004/0018192; WO 11/137418; and WO 01/068586; each of which is incorporated by reference in its entirety.

[0826] In some embodiments, any of the antibodies or antigen-binding fragments described herein has a dissociation constant (K_{D}) of less than 1×10⁻⁵M (e.g., less than 0.5×10⁻⁵ M, less than 1×10⁻⁶ M, less than 0.5×10⁻⁶ M, less than 1×10⁷ M, less than 0.5×10⁻⁷ M, less than 1×10⁻⁸ M, less than 0.5×10⁻⁸ M, less than 1×10⁻⁹ M, less than 0.5×10⁻⁹ M, less than 1×10⁻¹⁰ M, less than 0.5×10⁻¹⁰ M, less than 1×10⁻¹¹ M, less than 0.5×10⁻¹¹ M, or less than 1×10⁻¹²M), e.g., as measured in phosphate buffered saline using surface plasmon resonance (SPR).

[0827] In some embodiments, any of the antibodies or antigen-binding fragments described herein has a K_{D} of about 1×10⁻¹² M to about 1×10⁻⁵ M, about 0.5×10⁻⁵ M, about 1×10⁻⁶ M, about 0.5×10⁻⁶ M, about 1×10⁻⁷ M, about 0.5×10⁻⁷ M, about 1×10⁻⁸ M, about 0.5×10⁻⁸ M, about 1×10⁻⁹ M, about 0.5×10⁻⁹ M, about 1×10⁻¹⁰ M, about 0.5×10⁻¹⁰ M, about 1×10⁻¹¹ M, or about 0.5×10⁻¹¹ M (inclusive); about 0.5×10⁻¹¹ M to about 1×10⁻⁵ M, about 0.5×10⁻⁵ M, about 1×10⁻⁶ M, about 0.5×10⁻⁶ M, about 1×10⁷ M, about 0.5×10⁻⁷ M, about 1×10⁻⁸ M, about 0.5×10⁻⁸ M, about 1×10⁻⁹ M, about 0.5×10⁻⁹ M, about 1×10⁻¹⁰ M, about 0.5×10⁻¹⁰ M, or about 1×10⁻¹¹ M (inclusive); about 1×10⁻¹¹ M to about 1×10⁻⁵ M, about 0.5×10⁻⁵ M, about 1×10⁻⁶ M, about 0.5×10⁻⁶ M, about 1×10⁷ M, about 0.5×10⁻⁷ M, about 1×10⁻⁸ M, about 0.5×10⁻⁸ M, about 1×10⁻⁹M, about 0.5×10⁻⁹ M, about 1×10⁻¹⁰M, or about 0.5×10⁻¹⁰ M (inclusive); about 0.5×10⁻¹⁰ M to about 1×10⁻⁵ M, about 0.5×10⁻⁵ M, about 1×10⁻⁶ M, about 0.5×10⁻⁶ M, about 1×10⁻⁷ M, about 0.5×10⁻⁷ M, about 1×10⁻⁸ M, about 0.5×10⁻⁸ M, about 1×10⁻⁹ M, about 0.5×10⁻⁹ M, or about 1×10⁻¹⁰ M (inclusive); about 1×10⁻¹⁰ M to about 1×10⁻⁵ M, about 0.5×10⁻⁵ M, about 1×10⁻⁶ M, about 0.5×10⁻⁶ M, about 1×10⁻⁷ M, about 0.5×10⁻⁷ M, about 1×10⁻⁸ M, about 0.5×10⁻⁸ M, about 1×10⁻⁹ M, or about 0.5×10⁻⁹ M (inclusive); about 0.5×10⁻⁹ M to about 1×10⁻⁵ M, about 0.5×10⁻⁵ M, about 1×10⁻⁶ M, about 0.5×10⁻⁶ M, about 1×10⁻⁷ M, about 0.5×10⁻⁷ M, about 1×10⁻⁸ M, about 0.5×10⁻⁸ M, or about 1×10⁻⁹ M (inclusive); about 1×10⁻⁹ M to about 1×10⁻⁵ M, about 0.5×10⁻⁵ M, about 1×10⁻⁶ M, about 0.5×10⁻⁶ M, about 1×10⁻⁷ M, about 0.5×10⁻⁷ M, about 1×10⁻⁸ M, or about 0.5×10⁻⁸ M (inclusive); about 0.5×10⁻⁸ M to about 1×10⁻⁵ M, about 0.5×10⁻⁵ M, about 1×10⁻⁶ M, about 0.5×10⁻⁶ M, about 1×10⁻⁷ M, about 0.5×10⁻⁷ M, or about 1×10⁻⁸ M (inclusive); about 1×10⁻⁸ M to about 1×10⁻⁵ M, about 0.5×10⁻⁵ M, about 1×10⁻⁶ M, about 0.5×10⁻⁶ M, about 1×10⁷ M, or about 0.5×10⁻⁷ M (inclusive); about 0.5×10⁻⁷ M to about 1×10⁻⁵ M, about 0.5×10⁻⁵ M, about 1×10⁻⁶ M, about 0.5×10⁻⁶ M, or about 1×10⁻⁷ M (inclusive); about 1×10⁻⁷ M to about 1×10⁻⁵ M, about 0.5×10⁻⁵ M, about 1×10⁻⁶ M, or about 0.5×10⁻⁶ M (inclusive); about 0.5×10⁻⁶ M to about 1×10⁻⁵ M, about 0.5×10⁻⁵ M, or about 1×10⁻⁶ M (inclusive); about 1×10⁻⁶ M to about 1×10⁻⁵ M or about 0.5×10⁻⁵ M (inclusive); or about 0.5×10⁻⁵ M to about 1×10⁻⁵ M (inclusive), e.g., as measured in phosphate buffered saline using surface plasmon resonance (SPR).

[0828] In some embodiments, any of the antibodies or antigen-binding fragments described herein has a K_{off} of about 1×10⁻⁶ s⁻¹ to about 1×10⁻³ s⁻¹, about 0.5×10⁻³ s⁻¹, about 1×10⁻⁴ s⁻¹, about 0.5×10⁻⁴ s⁻¹, about 1×10⁻⁵ s⁻¹, or about 0.5×10⁻⁵ s⁻¹ (inclusive); about 0.5×10⁻⁵ s⁻¹ to about 1×10⁻³ s⁻¹, about 0.5×10⁻³ s⁻¹, about 1×10⁻⁴ s⁻¹, about 0.5×10⁻⁴ s⁻¹, or about 1×10⁻⁵ s⁻¹ (inclusive); about 1×10⁻⁵ s⁻¹ to about 1×10⁻³ s⁻¹, about 0.5×10⁻³ s⁻¹, about 1×10⁻⁴ s⁻¹, or about 0.5×10⁻⁴ s⁻¹ (inclusive); about 0.5×10⁻⁴ s⁻¹ to about 1×10⁻³ s⁻¹, about 0.5×10⁻³ s⁻¹, or about 1×10⁻⁴ s⁻¹ (inclusive); about 1×10⁻⁴ s⁻¹ to about 1×10⁻³ s⁻¹, or about 0.5×10⁻³ s⁻¹ (inclusive); or about 0.5×10⁻⁵ s⁻¹ to about 1×10⁻³ s⁻¹ (inclusive), e.g., as measured in phosphate buffered saline using surface plasmon resonance (SPR).

[0829] In some embodiments, any of the antibodies or antigen-binding fragments described herein has a Kₒₙ of about 1×10² M⁻¹s⁻¹ to about 1×10⁶ M⁻¹s⁻¹, about 0.5×10⁶ M⁻¹s⁻¹, about 1×10⁵ M⁻¹s⁻¹, about 0.5×10⁵ M⁻¹s⁻¹, about 1×10⁴ M⁻¹s⁻¹, about 0.5×10⁴ M⁻¹s⁻¹, about 1×10³ M⁻¹s⁻¹, or about 0.5×10³ M⁻¹s⁻¹(inclusive); about 0.5×10³ M⁻¹s⁻¹ to about 1×10⁶ M⁻¹s⁻¹, about 0.5×10⁶ M⁻¹s⁻¹, about 1×10⁵ M⁻¹s⁻¹, about 0.5×10⁵ M⁻¹s⁻¹, about 1×10⁴ M⁻¹s⁻¹, about 0.5×10⁴ M⁻¹s⁻¹, or about 1×10³ M⁻¹s⁻¹ (inclusive); about 1×10³ M⁻¹s⁻¹ to about 1×10⁶M⁻¹s⁻¹, about 0.5×10⁶ M⁻¹s⁻¹, about 1×10⁵ M⁻¹s⁻¹, about 0.5×10⁵ M⁻¹s⁻¹, about 1×10⁴ M⁻¹s⁻¹, or about 0.5×10⁴ M⁻¹s⁻¹ (inclusive); about 0.5×10⁴ M⁻¹s⁻¹ to about 1×10⁶ M⁻¹s⁻¹, about 0.5×10⁶ M⁻¹s⁻¹, about 1×10⁵ M⁻¹s⁻¹, about 0.5×10⁵ M⁻¹s⁻¹, or about 1×10⁴ M⁻¹s⁻¹ (inclusive); about 1×10⁴ M⁻¹s⁻¹ to about 1×10⁶ M⁻¹s⁻¹, about 0.5×10⁶ M⁻¹s⁻¹, about 1×10⁵ M⁻¹s⁻¹, or about 0.5×10⁵ M⁻¹s⁻¹(inclusive); about 0.5×10⁵ M⁻¹s⁻¹ to about 1×10⁶ M⁻¹s⁻¹, about 0.5×10⁶ M⁻¹s⁻¹, or about 1×10⁵ M⁻¹s⁻¹(inclusive); about 1×10⁵ M⁻¹s⁻¹ to about 1×10⁶ M⁻¹s⁻¹, or about 0.5×10⁶ M⁻¹s⁻¹ (inclusive); or about 0.5×10⁶ M⁻¹s⁻¹ to about 1×10⁶ M⁻¹s⁻¹ (inclusive), e.g., as measured in phosphate buffered saline using surface plasmon resonance (SPR).

### Fusion Proteins

[0830] In some embodiments, the integrin inhibitor is a fusion protein (e.g., an Fc fusion protein of an extracellular domain of an integrin or an integrin receptor), a soluble receptor (e.g., the extracellular domain of an integrin or an integrin receptor), or a recombinant integrin binding protein (e.g., an integrin ligand). See, e.g., Lode et al., PNAS 96(4):1591-1596, 1999; Stephens et al., Cell Adhesion Comm. 7:377-390, 2000; and US 2008/0739003; incorporated by reference herein). Non-limiting examples of fusion proteins that are integrin inhibitors include Ag25426 (Proteintech).

### Small Molecules Antagonists

[0831] In some embodiments, the integrin inhibitor is a small molecule. In some embodiments, the small molecule is a non-peptide small molecule. In some embodiments, the non-peptide small molecule is a RGD (ArgGlyAsp)-mimetic antagonist (e.g., tirofiban (Aggrastat®); Pierro et al., Eur. J. Ophthalmol. 26(4):e74-76, 2016; Guan et al., Eur. J. Pharmacol 761:144-152, 2015. In some embodiments, the small molecule is α4 antagonist (e.g., firategrast (Miller et al., Lancet Neurol. 11(2):131-139, 2012) AJM300 (Yoshimura et al., Gastroenterology 149(7):1775-1783, 2015; Takazoe et al., Gastroenterology 136(5):A-181, 2009; Sugiura et al., J. Crohns Colitis 7(11):e533-542, 2013)). In some embodiments, the small molecule is α4β1 antagonist (e.g., IVL745 (Norris et al., J. Allergy Clin. Immunol. 116(4):761-767, 2005; Cox et al., Nat. Rev. Drug Discov. 9(10):804-820, 2010)), BIO-1211 (Abraham et al., Am. J. Respir. Crit. Care Med 162:603-611, 2000; Ramroodi et al., Immunol. Invest. 44(7):694-712, 2015; Lin et al., J. Med Chem. 42(5):920-934, 1999), HMR 1031 (Diamant et al., Clin. Exp. Allergy 35(8):1080-1087, 2005); valategrast (R411) (Cox et al., Nat. Rev. Drug Discov. 9(10):804-820, 2010), GW559090X (Ravensberg et al., Allergy 61(9):1097-1103, 2006), TR14035 (Sircar et al., Bioorg. Med Chem. 10(6):2051-2066, 2002; Cortijo et al., Br. J. Pharmacol. 147(6):661-670, 2006)). In some embodiments, the small molecule is αvβ antagonist (e.g., L0000845704, SB273005). In some embodiments, the small molecule is α5β1 antagonist (e.g., JSM6427). In some embodiments, the small molecule is GLPG0974 (Vermeire et al., J. Crohns Colitis Suppl. 1:S39, 2015). In some embodiments, the small molecule is MK-0429 (Pickarksi et al., Oncol. Rep. 33(6):2737-45, 2015; Rosenthal et al., Asia Pac J. Clin. Oncol. 6:42-8, 2010). In some embodiments, the small molecule is JSM-6427 or a variant thereof (Zahn et al., Arch. Ophthalmol. 127(10):1329-1335, 2009; Stragies et al., J. Med Chem. 50:3786-94, 2007).

[0832] In some embodiments, the small molecule integrin inhibitor can be PTG-100, which is described in, e.g., Shames et al., “Pharmakokinetics and Pharmacodynamics of the Novel Oral Peptide Therapeutic PTG-100(α4β7 Integrin Antagonist) in Normal Healthy Volunteers,” 24^{th} United European Gastroentrology Week, October 15-19, Vienna, Austria, 2016.

[0833] In some embodiments, the small molecule targets β2 integrin. In some embodiments, the small molecule is SAR-118(SAR1118) or a variant thereof (Zhong et al., ACS Med. Chem. Lett. 3(3):203-206, 2012; Suchard et al., J. Immunol. 184:3917-3926, 2010; Yandrapu et al., J. Ocul. Pharmacol. Ther: 29(2):236-248, 2013; Semba et al., Am. J. Ophthalmol. 153:1050-60, 2012). In some embodiments, the small molecule is BMS-587101 or a variant thereof (Suchard et al., J. Immunol. 184(7):3917-3926, 2010; Potin et al., J. Med Chem. 49:6946-6949, 2006). See e.g., Shimaoka et al., Immunity 19(3):391-402, 2003; U.S. Pat. Nos. 7,138,417; 7,928,113; 7,943,660; and 9,216,174; US2008/0242710; and US 2008/0300237.

[0834] In some embodiments, the integrin inhibitor is an inhibitor as shown in the following table:

| | | | | |
|---|---|---|---|---|
| | Target- | | | |
| Drug | based | | | |
| Name | Actions | Structure | Other Drug Names | References |

ALPHA-4 INHIBITORS

| | | | | |
|---|---|---|---|---|
| ELND-004 Elan Corp plc | CD49d antagonist Alpha 4 inhibitor | [chemical structure] | ELND-004 | Soler-Ferran, Dulce, and Michael J Briskin. “Integrin α4β7 Antagonists: Activities, Mechanisms of Action and Therapeutic Prospects.” Current Immunology Reviews 8.2 (2012): 118-134. and U.S. Pat. No. 6,436,904; U.S. Pat. No. 6,492,421; U.S. Pat. No. 6,903,088; |
| | | | | U.S. Pat. No. 6,939,855; |
| | | | | U.S. Pat. No. 6,949,570; |
| | | | | U.S. Pat. No. 7,030,114; |
| | | | | U.S. Pat. No. 7,115,768; |
| | | | | U.S. Pat. No. 7,166,580; |
| | | | | U.S. Pat. No. 7,320,960; |
| | | | | U.S. Pat. No. 7,452,912; |
| | | | | U.S. Pat. No. 7,335,663 |
| ELND-002 | CD49d | | ELND-002; | U.S. Pat. No. 6,436,904; |
| (PEGylated | antagonist | | ELND-002 | U.S. Pat. No. 6,492,421; |
| subcutaneous | | | (PEGylated | U.S. Pat. No. 6,903,088; |
| formulation, | | | subcutaneous | U.S. Pat. No. 6,939,855; |
| hematological | | | formulation, | U.S. Pat. No. 6,949,570; |
| malignancies/ | | | hematological | U.S. Pat. No. 7,030,114; |
| multiple | | | malignancies/multiple | U.S. Pat. No. 7,115,768; |
| sclerosis) | | | sclerosis), Elan; alpha- | U.S. Pat. No. 7,166,580; |
| Elan Corp | | | 4 integrin inhibitor | U.S. Pat. No. 7,320,960; |
| plc | | | (injectable, | U.S. Pat. No. 7,452,912; |
| | | | hematologic | U.S. Pat. No. 7,335,663 |
| | | | malignancies), Elan | |
| ELND-002 (oral, multiple sclerosis) Elan Corp plc | CD49d antagonist | [chemical structure] | ELND-002; ELND-002 (oral, multiple sclerosis), Elan; alpha- 4 integrin antagonists (oral, autoimmune diseases), Elan; alpha-4 integrin antagonists (oral, multiple sclerosis), | U.S. Pat. No. 6,436,904; U.S. Pat. No. 6,492,421; U.S. Pat. No. 6,903,088; U.S. Pat. No. 6,939,855; U.S. Pat. No. 6,949,570; U.S. Pat. No. 7,030,114; U.S. Pat. No. 7,115,768; U.S. Pat. No. 7,166,580; U.S. Pat. No. 7,320,960; U.S. Pat. No. 7,452,912; |
| | | | Elan | U.S. Pat. No. 7,335,663 |
| alpha4- beta1/alpha4- beta7 antagonists (asthma), Roche | Integrin alpha- 4/beta-1 antagonist; Integrin alpha- 4/beta-7 antagonist | [chemical structure] | alpha4-beta1/alpha4- beta7 antagonist prodrugs (asthma), Roche; alpha4- beta1/alpha4-beta7 antagonists (asthma), Roche | See chemical structure; Sidduri A et al. “Identification of N- acyl 4-(5-pyrimidine-2,4- dionyl)phenylalanine derivatives and their orally active prodrug esters as dual-acting alpha4-beta1 and alpha4-beta7 receptor antagonists” Bioorganic and Medicinal Chemistry Letters (2013) 23 (4) 1026-1031 |
| alpha- 4/beta-7 integrin modulators (IBD), Morphic Therapeutic | Integrin alpha- 4/beta-7 modulator | [chemical structure] | alpha-4/beta-7 integrin modulators (IBD), Morphic Therapeutic | See chemical structure |
| ET-3764 | Integrin | | ET-3764; integrin | PCT/CA2017/000244, |
| integrin | alpha- | | alpha-4-beta-7- | which published as |
| alpha-4- | 4/beta-7 | | targeting nacellin (oral, | WO2018085921A1 |
| beta-7- | antagonist | | IBD), Encycle; | |
| targeting | | | macrocyclic | |
| nacellin | | | peptidomimetics, | |
| (oral, IBD), | | | Encycle; nacellins | |
| Encycle | | | (peptidomimetic | |
| Therapeutics | | | macrocycles), | |
| Inc | | | Encycle | |
| E-6007 | Integrin | | E-6007; integrin | See chemical structure; |
| (ER- | antagonist | | activation inhibitor | Ohkuro M, et al. “E6007: An |
| 46419501) | | | (ulcerative | orally active inhibitor of |
| Eisai Co | | | colitis/Crohn's | integrin activation for |
| Ltd | | | disease), EA Pharma; | inflammatory bowel |
| | | | integrin activation | disease” |
| | | | inhibitor (ulcerative | 2007 (May 20) Abs-S1588; |
| | | | colitis/Crohn's | Digestive Disease Week |
| | | | disease), Eisai | |
| ER- 464195-01 integrin (analogue of E6007) EA Pharma Co., Ltd | inhibits integrin activation by dissociating interaction between calreticulin (CRT) and integrin α4 (ITGA4) | [chemical structure] | | Ohkuro, Masayoshi, et al. “Calreticulin and integrin alpha dissociation induces anti-inflammatory programming in animal models of inflammatory bowel disease.” Nature communications 9.1 (2018): 1982 and WO2005063705 |
| HCA-3551 | Integrin | | HCA-3551; | Hirano, Yuta, et al. |
| EA Pharma | alpha- | | alpha-4 | “Ameliorating effects of HCA |
| Co Ltd | 4/beta-1 | | integrin antagonist | 3551, alpha 4 integrin |
| | antagonist; | | (multiple sclerosis), | antagonist, on Theiler's |
| | Integrin | | Ajinomoto | murine encephalomyelitis |
| | alpha- | | | virus (TMEV)-induced |
| | 4/beta-7 | | | demyelinating disease.” |
| | antagonist | | | Journal of |
| | | | | Neuroimmunology 275.1 |
| | | | | (2014): 157. |
| DW-908e Pharmacopeia Inc | Integrin alpha- 4/beta-1 antagonist | [chemical structure] | DW-908e; PS-181895; PS-460644; PS- 489655; PS-969819; allergy therapeutics, Daiichi; asthma therapeutics, Daiichi; asthma/allergy therapeutics, Daiichi | See chemical structure |
| VLA-4 antagonists, Texas/ Schering- Plough Encysive Pharma- ceuticals Inc | Integrin alpha- 4/beta-1 antagonist | [chemical structure] | AVA-4746; TBC-3342; TBC-4746; VLA-4 antagonists, Encysive/Schering- Plough; VLA-4 antagonists, Texas/Schering- Plough; integrin alpha- 4/beta-1 antagonists, Schering- Plough/Encysive | See chemical structure and WO-2004044046; EP-01203766; WO-2010008719 |
| GW- 559090 GlaxoSmith Kline plc | Integrin alpha- 4/beta-1 antagonist | [chemical structure] | 559090; GW-559090; alpha-4 integrin antagonist (inhaled), GlaxoSmithKline | See chemical structure and WO-00037444 |
| TRK-170 | Integrin | | TRK-170 | Koga Y, Kainoh, M “Effect of |
| Toray | alpha- | | | an orally active small |
| Industries | 4/beta-1 | | | molecule |
| Inc | antagonist; | | | alpha4beta1/alpha4beta7 |
| | Integrin | | | integrin antagonist, TRK- |
| | alpha- | | | 170, on experimental colitis |
| | 4/beta-7 | | | in mice” International |
| | antagonist | | | Congess on Immunology; |
| | | | | 2010 (August 22-27) |
| | | | | and |
| | | | | Hiroe Hirokawa, et al. |
| | | | | “Inhibitory Effects of an |
| | | | | Orally Active Small |
| | | | | Molecule |
| | | | | Alpha4beta1/Alpha4beta7 |
| | | | | Integrin Antagonist, Trk-170, |
| | | | | on Spontaneous Colitis in |
| | | | | HLA-B27 Transgenic Rats” |
| | | | | Digestive Disease Week; |
| | | | | 2014 (May 05) Abs Mo1706 |
| integrin | Integrin | | carotegrast; integrin | WO-00216329 |
| antagonists | alpha- | | antagonists | |
| (inflammation), | 4/beta-1 | | (inflammation), | |
| Ajinomoto | antagonist | | Ajinomoto | |
| Co Inc | | | | |
| TRK-720 Toray Industries Inc | Integrin alpha- 4/beta-1 antagonist | [chemical structure] | TRK-720; TRK-720 hydrate; VLA4 inhibitor (inhaled, asthma), Toray | Shiraki M “Physical characterization of trk-720 hydrate, the very late antigen-4 (via-4) inhibitor, as a solid form for inhalation: preparation of the hydrate by solvent exchange among its solvates and mechanistical considerations” Journal of Pharmaceutical Sciences; (2010) 99 (9) 3986-4004 |
| VLA-4 | Integrin | | MK-0617 and | [MK-0617] CARLEVARO, C. |
| antagonists | alpha- | | MK-0668 | MANUEL, et al. “Plausible |
| (inflammatory | 4/beta-1 | | | binding mode of the active |
| disorders) | antagonist | | | α4β1 antagonist, Mk-0617, |
| Merck | | | | determined by docking and |
| | | | | free energy calculations.” |
| | | | | Journal of Theoretical and |
| | | | | Computational Chemistry |
| | | | | 12.02 (2013): 1250108. |
| | | | | and |
| | | | | [MK-0668] Lin, Linus S., |
| | | | | et al. “Discovery of N-{N-[(3- |
| | | | | Cyanophenyl) sulfonyl]-4 |
| | | | | (R)-cyclobutylamino-(I)- |
| | | | | prolyl}-4-[(3′,5′- |
| | | | | dichloroisonicotinoyl) |
| | | | | amino]-(I)-phenylalanine |
| | | | | (MK-0668), an Extremely |
| | | | | Potent and Orally Active |
| | | | | Antagonist of Very Late |
| | | | | Antigen-4.” Journal of |
| | | | | medicinal chemistry 52.11 |
| | | | | (2009): 3449-3452. |
| LFA- | CD11a | | LFA-1/ICAM | WO-2005105766 |
| 1/ICAM | modulator; | | interaction inhibitors, | |
| interaction | ICAM-1 | | Biogen Idec | |
| inhibitors | modulator | | | |
| Biogen Inc | | | | |
| alpha-4 | Integrin | | alpha-4 beta-1/alpha-4 | Lawson et al. “Selection of a |
| beta- | alpha- | | beta-7 integrin | 2-azabicyclo[2.2.2]octane- |
| 1/alpha-4 | 4/beta-1 | | antagonists, Johnson | based .alpha.(4).beta.(1) |
| beta-7 | antagonist; | | & Johnson | integrin antagonist as an |
| integrin | Integrin | | | inhaled anti-asthmatic agent |
| antagonists | alpha- | | | Bioorganic and Medicinal |
| Johnson & | 4/beta-7 | | | Chemistry; 2006 14 (12) |
| Johnson | antagonist | | | 4208-4216 |
| VLA- 4/VCAM antagonists (inflammation) Elan Corp plc | Integrin alpha- 4/beta-1 antagonist; Vascular cell adhesion protein 1 modulator | [chemical structure] | CT-737; CT-747; CT- 757; CT-767; VLA- 4/VCAM antagonists (inflammation), Elan/Wyeth; VLA- 4/VCAM antagonists (inflammation), Elan/Wyeth-Ayerst | Xu Y, et al “Arylsulfonamide pyrimidines as vla-4 antagonists” Bioorganic and Medicinal Chemistry Letters; 2013 23 (10) 3070- 3074 |
| integrin antagonists, Zeneca Group plc | Integrin antagonist; Vascular cell adhesion protein 1 antagonist | [chemical structure] | VCAM antagonists, Zeneca; fibronectin antagonists, Zeneca; integrin antagonists, Zeneca | WO-09702289 and Haworth D et al., “Anti- inflammatory activity of c(ILDV-NH(CH2)5CO), a novel, selective, cyclic peptide inhibitor of VLA-4- mediated cell adhesion” British Journal of Pharmacology; 1999 126 |
| | | | | (8) 1751-1760 |
| SB-683698 | Integrin | | SB-683698; | Tsuda-Tsukimoto M, et al. |
| Tanabe | alpha- | | TR-14035; | “Characterization of |
| Seiyaku Co | 4/beta-1 | | TR-9109 | hepatobiliary transport |
| Ltd | antagonist; | | | systems of a novel |
| | Integrin | | | alpha4beta1/alpha4beta7 |
| | alpha- | | | dual antagonist, TR-14035”; |
| | 4/beta-7 | | | Pharmaceutical Research; |
| | antagonist | | | 2006 23 (11) 2646-2656 |
| R-1541 Roche Holding Co | Integrin antagonist | [chemical structure] | R-1541 | See chemical structure |
| alpha- 4/beta-7 antagonists, Millennium LeukoSite Inc | Integrin alpha- 4/beta-7 antagonist; MAdCAM inhibitor | [chemical structure] | A4B7 program, Millennium; alpha- 4/beta-7 antagonists, Millennium; autoimmune therapeutics, Genzyme/LeukoSite; beta-7 integrin receptor antagonists, LeukoSite; | Harriman GC et al. “Cell adhesion antagonists: Synthesis and evaluation of a novel series of phenylalanine based inhibitors” Bioorganic and Medicinal Chemistry Letters; 2000 10 (14) 1497- 1499 |
| | | | inflammatory disease | |
| | | | therapeutics, | |
| | | | Genzyme/LeukoSite; | |
| | | | inflammatory | |
| | | | therapeutics, | |
| | | | LeukoSite; small | |
| | | | molecule IBS | |
| | | | program, Millennium | |
| CP-664511 | Integrin | | CP-664511; VLA-4 | WO-00151487 |
| Pfizer | alpha- | | antagonists, Pfizer | and |
| | 4/beta-1 | | | Kudlacz E, et al. |
| | antagonist; | | | “Pulmonary eosinophilia in a |
| | Vascular | | | murine model of allergic |
| | cell | | | inflammation is attenuated |
| | adhesion | | | by small molecule |
| | protein 1 | | | alpha4beta1 antagonists” |
| | antagonist | | | Journal of Pharmacology |
| | | | | and Experimental |
| | | | | Therapeutics; 2002 301 (2) |
| | | | | 747-752 |

BETA-7 INHIBITORS

| | | | |
|---|---|---|---|
| alpha | Integrin | alpha epsilon beta 7 | US 09/856,544 and |
| epsilon | alpha-E | integrin antagonists | PCT/US99/27817 |
| beta 7 | antagonist; | (inflammatory | |
| integrin | Integrin | disease), NIAID | |
| antagonists | beta-7 | | |
| (inflammatory | antagonist | | |
| disease), | | | |
| NIAID | | | |
| alpha- | Integrin | alpha-4/beta-7 integrin | Callier Dublanchet A-C, |
| 4/beta-7 | alpha- | inhibitors, Jouveinal | et al. “Potential alpha4beta7 |
| integrin | 4/beta-7 | | integrin-mediated cell |
| inhibitors, | antagonist | | adhesion inhibitors: |
| Institut de | | | synthesis and evaluation of |
| Recherche | | | novel pyrazolones |
| Jouveinal | | | derivatives and a study of |
| SA (IRJ) | | | their stability” ACS Meeting; |
| | | | 2000 220th (Washington |
| | | | DC) MEDI 142 |

ITGAL-Integrin alpha-L

| | | | | |
|---|---|---|---|---|
| lifitegrast Sunesis Pharma- ceuticals Inc | CD11a antagonist (integrin alpha-L (ITGAL)) ICAM-1 inhibitor | [chemical structure] | SAR-1118; SHP-606; SPD-606; Xiidra; dual LFA-1/ICAM-1 inhibitors (inflammatory diseases), SARcode; dual LFA-1/ICAM-1 inhibitors, Sunesis; | Zhong M, et al. “Structure- activity relationship (SAR) of the alpha-amino acid residue of potent tetrahydroisoquinoline (THIQ)-derived LFA- 1/ICAM-1 antagonists” Bioorganic and Medicinal |
| | | | lifitegrast; lifitegrast | Chemistry Letters; 2011 21 |
| | | | sodium | (1) 307-310 |
| BIRT-2584 | CD11a | | BIRT-0377; BIRT- | Wu J-P, et al. “The |
| Boehringer | antagonist; | | 2584; BIRT-2584 XX; | discovery of 1H- |
| Ingelheim | Cell | | BIRT-377; ICAM-1 | imidazo[1,2-alfa]imidazol-2- |
| International | adhesion | | antagonists | one derivatives as LFA-1 |
| GmbH | molecule | | (inflammation), | inhibitors” Inflammation |
| | inhibitor; | | Boehringer Ingelheim; | Research; 2003 52 (Suppl |
| | ICAM-1 | | LFA-1 inhibitors | 2) Abs 137 |
| | inhibitor; | | (inflammation/allergy), | and |
| | ITGAL | | Boehringer Ingelheim | WO-2007084882 |
| LFA- | CD11a | | CP151088; ICAM- | Khojasteh SC, et al. |
| 1/ICAM-1 | modulator; | | 2078; ICAM-850; LFA- | “Preclinical absorption, |
| interaction | CD11b | | 1/ICAM-1 interaction | distribution, metabolism and |
| inhibitors, | modulator; | | inhibitors, | excretion (ADME) |
| Genentech | ICAM-1 | | Genentech/Roche; | characterization of |
| Inc | modulator | | LFA-1/ICAM-1 | ICAM1988, an LFA-1/ICAM |
| | | | interaction inhibitors, | antagonist, and its prodrug” |
| | | | Roche; Mac-1/ICAM-1 | Xenobiotica; 2008 38 (3) |
| | | | interaction inhibitors, | 340-352 |
| | | | Genentech; Mac- | and |
| | | | 1/ICAM-1 interaction | WO-02059114 |
| | | | inhibitors, Roche; | |
| | | | RO-0276845; | |
| | | | RO-5182851; | |
| | | | RO-5184438; | |
| | | | RO-5200045 | |
| LFA-1 inhibitors, Novartis Pharma AG | CD11a antagonist; ICAM inhibitor | [chemical structure] | LFA-1 inhibitors, Novartis; LFA-451; LFA-703; LFA-878; XVA-143 | See chemical structure |
| IC-776 ICOS Corp | CD11a antagonist; ICAM inhibitor | [chemical structure] | A-276594; A-286982; A-292949; A-295339; A-324920; IC-52593; IC-776; LFA-1 antagonists, ICOS; LFA-1/ICAM-1 inhibitors, Abbott/ICOS; LFA- 1/ICAM-1 inhibitors, ICOS; LFA-1/ICAM-1 inhibitors, ICOS/Biogen | Pei Z, et al. “Discovery of potent antagonists of leukocyte function- associated antigen- 1/inercellular adhesion molecule-1 interaction. 3. Amide (C-ring) structure- activity relationship and improvement of overall properties of arylthio cinnamides” Journal of Medicinal Chemistry; 2001 44 (18) 2913-2920 |

[chemical structure]

Other exemplary integrin inhibitors include the following:
[0835] SMART anti-L-selectin Mab from PDL BioPharma Inc., which is L-Selectin antagonist, and described in WO-09706822, and Co M S, et al. “Properties and pharmacokinetics of two humanized antibodies specific for L-selectin”; Immunotechnology; 1999 4253-266; both of which are hereby incorporated by reference
[0836] SEL-K2, an anti-PSGL-1 antibody, from Tetherex Pharmaceuticals Ic, which is described in Barbara Muz, et al. “Inhibition of P-Selectin and PSGL-1 Using Humanized Monoclonal Antibodies Increases the Sensitivity of Multiple Myeloma Cells to Proteasome Inhibitors” American Society of Hematology Annual Meeting and Exposition; 2014 56th (December 08) Abs 4758, which is hereby incorporated by reference
[0837] Vatelizumab described in I. A. Antonijevic, et al. “Safety, tolerability and pharmacodynamic characterization of vatelizumab, a monoclonal antibody targeting very-late-antigen (VLA)-2: a randomized, double-blind, placebo-controlled phase 1 study” Abstract release date: Sep. 23, 2015) ECTRIMS Online Library. Oct. 9, 2015; and WO-2010095031; WO-2011104604; WO-2010052556, which are all hereby incorporated by reference
[0838] anti-VCAM mAb, which is described in Soriano, Antonio, et al. “VCAM-1, but not ICAM-1 or MAdCAM-1, immunoblockade ameliorates DSS-induced colitis in mice.” Laboratory investigation 80.10 (2000): 1541; and Gerritsen M E, et al. (1995). Activation-dependent isolation and culture of murine pulmonary microvascular endothelium. Microcirculation 2:151-163.

### Cyclic Peptides

[0839] In some embodiments, the integrin inhibitor is a cyclic peptide. In some embodiments, the cyclic peptide comprises or consists of an amino acid sequence as set forth in the amino acid sequence of a ligand recognition sequence of an endogenous integrin ligand. In some embodiments, the cyclic peptide competes for a target integrin ligand binding site with an endogenous integrin ligand. In some embodiments, the cyclic peptide includes one or more (e.g., 1, 2, 3, 4, 5, 6, 7, 8) D-amino acids. In some embodiments, the cyclic peptide is a synthetic cyclic peptide. In some embodiments, the synthetic cyclic peptide is a heptapeptide. In some embodiments, the synthetic cyclic peptide is eptifabitide (Integrilin™), or a variant thereof. In some embodiments, the cyclic peptide comprises a heterocyclic nucleic (e.g., a benzodiazepinone, a piperazine, a benzoazepinone, a nitroaryl, an isoxazoline, an indazole, or a phenol; Spalluto et al., Curr. Med. Chem. 12:51-70, 2005). In some embodiments, the cyclic peptide is a macrocycle (see, e.g., Halland et al., ACS Med. Chem. Lett. 5(2):193-198, 2014). In some embodiments, the peptide is ALG-1001 or a variant thereof (Mathis et al., Retin. Phys. 9:70, 2012). In some embodiments, the cyclic peptide is an imidazolone-phenylalanine derivative, a heteroaryl, hetrocyclic, and aryl derivative, a bicyclic-aromatic amino acid derivative, a cyclohexane-carboxylic acid derivative, a di-aryl substituted urea derivative, a multimeric L-alanine derivative, a L-alanine derivative, or a pyrimidyl-sulfonamide derivative (see, e.g., U.S. Pat. Nos. 6,630,492; 6,794,506; 7,049,306; 7,371,854; 7,759,387; 8,030,328; 8,129,366; 7,820,687; 8,350,010; and 9,345,793).

### Peptidomimetics

[0840] In some embodiments, the integrin inhibitor is a peptidomimetic. In some embodiments, the peptidomimetic has an integrin-ligand recognition motif (e.g., RGD, KTS, or MLD). See, e.g., Carron et al., Cancer Research 58:1930-1935, 1998; Fanelli et al., Vascular Cell 6:11, 2014; and De Marco et al., Curr. Top. Med. Chem. 16(3):343-359, 2016.

[0841] In some embodiments, the peptidomimetic is an RGD(ArgGlyAsp)-based peptide (U.S. Pat. No. 8,809,338, incorporated by reference in its entirety herein). In some embodiments, the RGD-based peptide can be cilengitide or a variant thereof (EMD 12974) (Mas-Moruno et al., Anticancer Agents Med. Chem. 10:753-768, 2010; Reardon et al., Future Oncol. 7(3):339-354, 2011; Beekman et al., Clin. Genitourin Cancer 4(4):299-302, 2006; SC56631 (e.g., Engleman et al., Am Soc. Cln. Invest. 99(9):2284-2292, 1997; Peng et al., Nature Chem Biol. 2:381-389, 2006). In some embodiments, the peptidomimetic can be a Lys-Gly-Asp (KGD)-based peptide. In some embodiments, the peptidomimetic can be vipegitide or a variant thereof (Momic et al., Drug Design Devel. Therapy 9:291-304, 2015). In some embodiments, the peptidomimetic can be a peptide conjugated with an antimicrobial synthetic peptide. (e.g., ACDCRGDCFC conjugated with (KLAKLAK)₂(Ellerby et al., Nat. Med. 5(9):1032-1038, 1999). See, e.g., U.S. Pat. No. 8,636,977.

### Disintegrins

[0842] In some embodiments, the integrin inhibitor can be a disintegrin. The term “disintegrin” as used herein refers to a low molecular weight peptide integrin inhibitor derived from a snake venom (e.g., pit viper venom). In some embodiments, the disintegrin is a RGD(ArgGlyAsp)-, a KTS- or an MLD-based disintegrin.

[0843] Non-limiting examples of disintegrins include accutin, accurhagin-C, albolabrin, alternagin-c, barbourin, basilicin, bitisgabonin-1, bitisgabonin-2, bitistatin, cerastin, cereberin, cumanastatin 1, contortrostatin, cotiarin, crotatroxin, dendroaspin, disba-01, durissin, echistatin, EC3, elegantin, eristicophin, eristostatin, EMS11, EO4, EO5, flavoridin, flavostatin, insularin, jarastatin, jerdonin, jerdostatin, lachesin, lebein (e.g., lebein-1, lebein-2), leberagin-C, lebestatin, lutosin, molossin, obtustatin, ocellatusin, rhodocetin, rhodostomin, R-mojastin 1, salmosin, saxatilin, schistatin, tablysin-15, tergeminin, triflavin, trigramin, trimestatin, VA6, vicrostatin, viridin, viperstatin, VB7, VLO4, and VLO5, or a variant thereof. See, e.g., Arruda Macedo et al., Curr. Protein. Pept. Sci. 16(6):532-548, 2015; Hsu et al., Sci. Rep. 6:23387, 2016; Kele et al. Curr. Protein Pept. Sci. 6:532-548, 2015; Koh et al., Toxicon 59(4):497-506, 2012; Scarborough et al., J. Biol. Chem. 268:1058-1065, 1993; Kisiel et al., FEBS Lett. 577:478-482, 2004; Souza et al., Arch. Biochem. Biophys. 384:341-350, 2000; Eble et al., J. Biol. Chem. 278:26488-26496, 2003; Marcinkiewicz et al., J. Biol. Chem. 274:12468-12473, 1999; Calvete et al., J. Proteome Res. 6:326-336, 2007; Scibelli et al., FEMS Microbiol. Lett. 247:51-57, 2005; Oliva et al., Toxicon 50:1053-1063, 2007; Minea et al., Toxicon 59:472-486, 2012; Smith et al., FEBS Lett. 512:111-115, 2002; Tselepis et al., J. Biol. Chem. 272:21341-21348, 1997; Da Silva et al., Tromb. Res. 123:731-739, 2009; Thibault et al., Mol. Pharmacol. 58:1137-1145, 2000; Lu et al., Biochem. J 304:818-825, 1994; Yeh et al., Biochim. Biophys. Acta. 1425:493-504, 1998; Huang et al., Exp. Hematol. 36:1704-1713, 2008; Shih et al., Matrix Biol. 32:152-159, 2013; Wang et al., Br. J. Pharmacol. 160:1338-1351, 2010; Della-Casa et al., Toxicon 57:125-133, 2011; Sheu et al., Biochim. Biophys. Acta. 1336:445-454, 1997; Fujii et al., J. Mol. Biol. 332:115-122, 2003; Bilgrami et al., J. Mol. Biol. 341:829-837, 2004; Zhou et al., Toxicon 43:69-75, 2004; Scarborough et al., J. Biol. Chem. 268:1066-1073, 1993; Shebuski et al., J. Biol. Chem. 264:21550-21556, 1989; Lu et al., Biochem. J 304:929-936, 1994; McLane et al., Biochem. J. 301:429-436, 1994; Juarez et al., Toxicon 56:1052-1058, 2010; Olfa et al., Lab. Invest. 85:1507-1516, 2005; Elbe et al., Matrix Biol. 21:547-558, 2002; Bazan-Socha et al., Biochemistry 43:1639-1647, 2004; Danen et al., Exp. Cell. Res. 238:188-196, 1998; Marcinkiewicz et al., Biochemistry 38(40):13302-13309, 1999; Calvete et al., Biochem. J. 372:725-734, 2003; Swenson et al., Pathophysiol. Haemost. Thromb. 34:169-176, 2005; Kwon et al., PLoS One 8; e81165, 2013; Yang et al., Toxicon 45:661-669, 2005; Limam et al., Matrix Biol. 29:117-126, 2010; Gan et al., J. Biol. Chem. 263:19827-19832, 1988; Ma et al., Thromb. Haemost. 105(6):1032-1045, 2011; and U.S. Pat. No. 7,074,408, incorporated in their entirety herein.

### Chemokine/Chemokine Receptor Inhibitors

[0844] The term “chemokine/chemokine receptor inhibitors” refers to an agent which decreases the ability of a chemokine to bind to its receptor, where the chemokine is one of CXCL10 (IL-10), CCL11, or an ELR chemokine, or the chemokine receptor is CCR2 or CCR9.

### CXCL10 (IP-10) Inhibitors

[0845] As used herein “CXCL10”, “interferon gamma-induced protein 10” and “IP-10” can be used interchangeably. CXCL10 binds to the CXCR3 receptor (e.g., CXCR3-A or CXCR3-B).

[0846] The term “CXCL10 inhibitor” refers to an agent which decreases the ability of CXCL10 to bind to a CXCR3 receptor (e.g., CXCR3-A and/or CXCR3-B).

[0847] In some embodiments, the CXCL10 inhibitor can decrease the binding between CXCL10 and CXCR3-A by blocking the ability of CXCL10 to interact with CXCR3-A. In some embodiments, the CXCL10 inhibitor can decrease the binding between CXCL10 and CXCR3-B by blocking the ability of CXCL10 to interact with CXCR3-B.

[0848] In some instances, the CXCL10 inhibitor that decreases the binding between CXCL10 and a CXCR3 (e.g., CXCR3-A and/or CXCR3-B) is a small molecule. In some instances, the CXCL10 inhibitor that decreases the binding between CXCL10 and a CXCR3 (e.g., CXCR3-A and/or CXCR3-B) is an antibody or an antigen-binding antibody fragment. In some instances, the CXCL10 inhibitor that decreases the binding between CXCL10 and a CXCR3 (e.g., CXCR3-A and/or CXCR3-B) is a peptide (e.g., a peptide antagonist of a CXCR3 receptor, e.g., one or both of CXCR-A and/or CXCR-B).

[0849] Exemplary sequences for human CXCL10 and human CXCR3 are shown below.

### Human CXCL10 (SEQ ID NO: 182)

[0850] vplsrtvrc tcisisnqpv nprsleklei ipasqfcprv eiiatmkkkg ekrclnpesk aiknllkavs kerskrsp

### Human CXCR3 Isoform 1 (SEQ ID NO: 183)

[0851] mvlevsdhqv lndaevaall enfsssydyg enesdsccts ppcpqdfsln fdraflpaly
sllfllgllg ngavaavlls rrtalsstdt fllhlavadt llvltlplwa vdaavqwvfg
sglckvagal fninfyagal llacisfdry lnivhatqly rrgpparvtl tclavwglcl
lfalpdfifl sahhderlna thcqynfpqv grtalrvlql vagfllpllv maycyahila
vllvsrgqrr lramrlvvvv vvafalcwtp yhlvvlvdil mdlgalarnc gresrvdvak
svtsglgymh cclnpllyaf vgvkfrermw mlllrlgcpn qrglqrqpss srrdsswset
seasysgl

### Human CXCR3 Isoform 2 (SEQ ID NO: 184)

[0852] melrkygpgr lagtviggaa qsksqtksds itkeflpgly tapsspfpps qvsdhqvlnd
aevaallenf sssydygene sdscctsppc pqdfslnfdr aflpalysll fllgllgnga
vaavllsrrt alsstdtfll hlavadtllv ltlplwavda avqwvfgsgl ckvagalfni
nfyagallla cisfdrylni vhatqlyrrg pparvtltcl avwglcllfa lpdfiflsah
hderlnathc qynfpqvgrt alrvlqlvag fllpllvmay cyahilavll vsrgqrrlra
mrlvvvvvva falcwtpyhl vvlvdilmdl galarnegre srvdvaksvt sglgymhccl
npllyafvgv kfrermwmll lrlgcpnqrg lqrqpsssrr dsswsetsea sysgl

### CXCL10 Inhibitors—Antibodies

[0853] In some embodiments, the CXCL10 inhibitor is an antibody or an antigen-binding fragment thereof (e.g., a Fab or a scFv). In some embodiments, an antibody or antigen-binding fragment described herein binds specifically to CXCL10 or a CXCR3 receptor (e.g., CXCR3-A and/or CXCR3-B), or both a CXCL10 and a CXCR3 receptor (e.g., CXCR3-A and/or CXCR3-B). In some embodiments, a CXCL10 inhibitor can bind to both CXCR3-A and CXCR3-B.

[0854] In some embodiments, the antibody can be a humanized antibody, a chimeric antibody, a multivalent antibody, or a fragment thereof. In some embodiments, an antibody can be a scFv-Fc (Sokolowska-Wedzina et al., Mol. Cancer Res. 15(8):1040-1050, 2017), a VHH domain (Li et al., Immunol. Lett. 188:89-95, 2017), a VNAR domain (Hasler et al., Mol. Immunol. 75:28-37, 2016), a (scFv)₂, a minibody (Kim et al., PLoS One 10(1):e113442, 2014), or a BiTE. In some embodiments, an antibody can be a DVD-Ig (Wu et al., Nat. Biotechnol. 25(11):1290-1297, 2007; WO 08/024188; WO 07/024715), and a dual-affinity re-targeting antibody (DART) (Tsai et al., Mol. Ther. Oncolytics 3:15024, 2016), a triomab (Chelius et al., MAbs 2(3):309-319, 2010), kih IgG with a common LC (Kontermann et al., Drug Discovery Today 20(7):838-847, 2015), a crossmab (Regula et al., EMBO Mol. Med. 9(7):985, 2017), an ortho-Fab IgG (Kontermann et al., Drug Discovery Today 20(7):838-847, 2015), a 2-in-1-IgG (Kontermann et al., Drug Discovery Today 20(7):838-847, 2015), IgG-scFv (Cheal et al., Mol. Cancer Ther. 13(7):1803-1812, 2014), scFv2-Fc (Natsume et al., J. Biochem. 140(3):359-368, 2006), a bi-nanobody (Kontermann et al., Drug Discovery Today 20(7):838-847, 2015), tanden antibody (Kontermann et al., Drug Discovery Today 20(7):838-847, 2015), a DART-Fc (Kontermann et al., Drug Discovery Today 20(7):838-847, 2015), a scFv-HSA-scFv (Kontermann et al., Drug Discovery Today 20(7):838-847, 2015), DNL-Fab3 (Kontermann et al., Drug Discovery Today 20(7):838-847, 2015), DAF (two-in-one or four-in-one), DutaMab, DT-IgG, knobs-in-holes common LC, knobs-in-holes assembly, charge pair antibody, Fab-arm exchange antibody, SEEDbody, Triomab, LUZ-Y, Fcab, kλ-body, orthogonal Fab, DVD-IgG, IgG(H)-scFv, scFv-(H)IgG, IgG(L)-scFv, scFv-(L)-IgG, IgG (L,H)-Fc, IgG(H)-V, V(H)—IgG, IgG(L)-V, V(L)-IgG, KIH IgG-scFab, 2scFv-IgG, IgG-2scFv, scFv4-Ig, Zybody, DVI-IgG, nanobody (e.g., antibodies derived from Camelus bactriamus, Calelus dromaderius, or Lama paccos) (U.S. Pat. No. 5,759,808; Stijlemans et al., J. Biol. Chem. 279:1256-1261, 2004; Dumoulin et al., Nature 424:783-788, 2003; and Pleschberger et al., Bioconjugate Chem. 14:440-448, 2003), nanobody-HSA, a diabody (e.g., Poljak, Structure 2(12):1121-1123, 1994; Hudson et al., J. Immunol. Methods 23(1-2):177-189, 1999), a TandAb (Reusch et al., mAbs 6(3):727-738, 2014), scDiabody (Cuesta et al., Trends in Biotechnol. 28(7):355-362, 2010), scDiabody-CH3 (Sanz et al., Trends in Immunol. 25(2):85-91, 2004), Diabody-CH3, Triple Body, miniantibody, minibody, TriBi minibody, scFv-CH3 KIH, Fab-scFv, scFv-CH-CL-scFv, F(ab′)2-scFV2, scFv-KIH, Fab-scFv-Fc, tetravalent HCAb, scDiabody-Fc, diabody-Fc, tandem scFv-Fc, intrabody (Huston et al., Human Antibodies 10(3-4):127-142, 2001; Wheeler et al., Mol. Ther. 8(3):355-366, 2003; and Stocks, Drug Discov. Today 9(22):960-966, 2004), dock and lock bispecific antibody, ImmTAC, HSAbody, scDiabody-HSA, tandem scFv, IgG-IgG, Cov-X-Body, and scFv1-PEG-scFv2.

[0855] Non-limiting examples of an antigen-binding fragment of an antibody include an Fv fragment, a Fab fragment, a F(ab′)₂ fragment, and a Fab′ fragment. Additional examples of an antigen-binding fragment of an antibody is an antigen-binding fragment of an IgG (e.g., an antigen-binding fragment of IgG1, IgG2, IgG3, or IgG4) (e.g., an antigen-binding fragment of a human or humanized IgG, e.g., human or humanized IgG1, IgG2, IgG3, or IgG4); an antigen-binding fragment of an IgA (e.g., an antigen-binding fragment of IgA1 or IgA2) (e.g., an antigen-binding fragment of a human or humanized IgA, e.g., a human or humanized IgA1 or IgA2); an antigen-binding fragment of an IgD (e.g., an antigen-binding fragment of a human or humanized IgD); an antigen-binding fragment of an IgE (e.g., an antigen-binding fragment of a human or humanized IgE); or an antigen-binding fragment of an IgM (e.g., an antigen-binding fragment of a human or humanized IgM).

[0856] In some embodiments, an antibody can be an IgNAR, a bispecific antibody (Milstein and Cuello, Nature 305:537-539, 1983; Suresh et al., Methods in Enzymology 121:210, 1986; WO 96/27011; Brennan et al., Science 229:81, 1985; Shalaby et al., J. Exp. Med. 175:217-225, 1992; Kolstelny et al., J. Immunol. 148(5):1547-1553, 1992; Hollinger et al., Proc. Natl. Acad. Sci. U.S.A. 90:6444-6448, 1993; Gruber et al., J. Immunol. 152:5368, 1994; and Tutt et al., J. Immunol. 147:60, 1991), a bispecific diabody, a triabody (Schoonooghe et al., BMC Biotechnol. 9:70, 2009), a tetrabody, scFv-Fc knobs-into-holes, a scFv-Fc-scFv, a (Fab′scFv)₂, a V-IgG, a IvG-V, a dual V domain IgG, a heavy chain immunoglobulin or a camelid (Holt et al., Trends Biotechnol. 21(11):484-490, 2003), an intrabody, a monoclonal antibody (e.g., a human or humanized monoclonal antibody), a heteroconjugate antibody (e.g., U.S. Pat. No. 4,676,980), a linear antibody (Zapata et al., Protein Eng. 8(10:1057-1062, 1995), a trispecific antibody (Tutt et al., J. Immunol. 147:60, 1991), a Fabs-in-Tandem immunoglobulin (WO 15/103072), or a humanized camelid antibody.

[0857] In some embodiments, the antibody is a humanized antibody, a chimeric antibody, a multivalent antibody, or a fragment thereof. In some embodiments, the antibody is a monoclonal antibody. In some embodiments, the antibody is a humanized monoclonal antibody. See e.g., Hunter & Jones, Nat. Immunol. 16:448-457, 2015; and Heo et al., Oncotarget 7(13):15460-15473, 2016. Additional examples of antibodies and antigen-binding fragments thereof are described in U.S. Pat. Nos. 8,440,196; 7,842,144; 8,034,344; and 8,529,895; US 2013/0317203; US 2014/0322239; US 2015/0166666; US 2016/0152714; and US 2017/0002082, each of which is incorporated by reference in its entirety (e.g., the sections describing CXCL10 inhibitors).

[0858] In other instances, the CXCL10 inhibitor is a monoclonal antibody (mAb) (see, e.g., WO05/58815). For example, the CXCL10 inhibitor can be Eldelumab® (MDX-1100 or BMS-936557), BMS-986184 (Bristol-Meyers Squibb), or NI-0801 (NovImmune). See, e.g., Kuhne et al., J. Immunol. 178(1):S241, 2007; Sandborn et al., J. Crohns Colitis 11(7):811-819, 2017; and Danese et al., Gastroenterology 147(5):981-989, 2014. Additional examples of CXCL10 inhibitors that are antibodies are described in U.S. Patent Application Publication Nos. 2017/0158757, 2017/0081413, 2016/0009808, 2015/0266951, 2015/0104866, 2014/0127229, 2014/0065164, 2013/0216549, 2010/0330094, 2010/0322941, 2010/0077497, 2010/0021463, 2009/0285835, 2009/0169561, 2008/0063646, 2005/0191293, 2005/0112119, 2003/0158392, 2003/0031645, and 2002/0018776; and WO 98/11218, each of which is incorporated by reference in its entirety (e.g., the description of CXCL10 inhibitors).

[0859] In some embodiments, any of the antibodies or antigen-binding fragments described herein has a dissociation constant (K_{D}) of less than 1×10⁻⁵ M (e.g., less than 0.5×10⁻⁵ M, less than 1×10⁻⁶ M, less than 0.5×10⁻⁶ M, less than 1×10⁻⁷ M, less than 0.5×10⁻⁷ M, less than 1×10⁻⁸ M, less than 0.5×10⁻⁸ M, less than 1×10⁻⁹ M, less than 0.5×10⁻⁹ M, less than 1×10⁻¹⁰ M, less than 0.5×10⁻¹⁰ M, less than 1×10⁻¹¹ M, less than 0.5×10⁻¹¹ M, or less than 1×10⁻¹² M), e.g., as measured in phosphate buffered saline using surface plasmon resonance (SPR).

[0860] In some embodiments, any of the antibodies or antigen-binding fragments described herein has a K_{D} of about 1×10⁻¹² M to about 1×10⁻⁵ M, about 0.5×10⁻⁵ M, about 1×10⁻⁶ M, about 0.5×10⁻⁶ M, about 1×10⁻⁷ M, about 0.5×10⁻⁷ M, about 1×10⁻⁸ M, about 0.5×10⁻⁸ M, about 1×10⁻⁹ M, about 0.5×10⁻⁹ M, about 1×10⁻¹⁰ M, about 0.5×10⁻¹⁰ M, about 1×10⁻¹¹ M, or about 0.5×10⁻¹¹ M (inclusive); about 0.5×10⁻¹¹ M to about 1×10⁻⁵ M, about 0.5×10⁻⁵ M, about 1×10⁻⁶ M, about 0.5×10⁻⁶ M, about 1×10⁻⁷ M, about 0.5×10⁻⁷ M, about 1×10⁻⁸ M, about 0.5×10⁻⁸ M, about 1×10⁻⁹ M, about 0.5×10⁻⁹ M, about 1×10⁻¹⁰ M, about 0.5×10⁻¹⁰ M, or about 1×10⁻¹¹ M (inclusive); about 1×10⁻¹¹ M to about 1×10⁻⁵ M, about 0.5×10⁻⁵ M, about 1×10⁻⁶ M, about 0.5×10⁻⁶ M, about 1×10⁻⁷ M, about 0.5×10⁻⁷ M, about 1×10⁻⁸ M, about 0.5×10⁻⁸ M, about 1×10⁻⁹ M, about 0.5×10⁻⁹ M, about 1×10⁻¹⁰ M, or about 0.5×10⁻¹⁰ M (inclusive); about 0.5×10⁻¹⁰ M to about 1×10⁻⁵ M, about 0.5×10⁻⁵ M, about 1×10⁻⁶ M, about 0.5×10⁻⁶ M, about 1×10⁻⁷ M, about 0.5×10⁻⁷ M, about 1×10⁻⁸ M, about 0.5×10⁻⁸ M, about 1×10⁻⁹ M, about 0.5×10⁻⁹ M, or about 1×10⁻¹⁰ M (inclusive); about 1×10⁻¹⁰ M to about 1×10⁻⁵ M, about 0.5×10⁻⁵ M, about 1×10⁻⁶ M, about 0.5×10⁻⁶ M, about 1×10⁻⁷ M, about 0.5×10⁻⁷ M, about 1×10⁻⁸ M, about 0.5×10⁻⁸ M, about 1×10⁻⁹ M, or about 0.5×10⁻⁹ M (inclusive); about 0.5×10⁻⁹ M to about 1×10⁻⁵ M, about 0.5×10⁻⁵ M, about 1×10⁻⁶ M, about 0.5×10⁻⁶ M, about 1×10⁻⁷ M, about 0.5×10⁻⁷ M, about 1×10⁻⁸ M, about 0.5×10⁻⁸ M, or about 1×10⁻⁹ M (inclusive); about 1×10⁻⁹ M to about 1×10⁻⁵ M, about 0.5×10⁻⁵ M, about 1×10⁻⁶ M, about 0.5×10⁻⁶ M, about 1×10⁻⁷ M, about 0.5×10⁻⁷ M, about 1×10⁻⁸ M, or about 0.5×10⁻⁸ M (inclusive); about 0.5×10⁻⁸ M to about 1×10⁻⁵ M, about 0.5×10⁻⁵ M, about 1×10⁻⁶ M, about 0.5×10⁻⁶ M, about 1×10⁻⁷ M, about 0.5×10⁻⁷ M, or about 1×10⁻⁸ M (inclusive); about 1×10⁻⁸ M to about 1×10⁻⁵ M, about 0.5×10⁻⁵ M, about 1×10⁻⁶ M, about 0.5×10⁻⁶ M, about 1×10⁻⁷ M, or about 0.5×10⁻⁷ M (inclusive); about 0.5×10⁻⁷ M to about 1×10⁻⁵ M, about 0.5×10⁻⁵ M, about 1×10⁻⁶ M, about 0.5×10⁻⁶ M, or about 1×10⁻⁷ M (inclusive); about 1×10⁻⁷ M to about 1×10⁻⁵ M, about 0.5×10⁻⁵ M, about 1×10⁻⁶ M, or about 0.5×10⁻⁶ M (inclusive); about 0.5×10⁻⁶ M to about 1×10⁻⁵ M, about 0.5×10⁻⁵ M, or about 1×10⁻⁶ M (inclusive); about 1×10⁻⁶ M to about 1×10⁻⁵ M or about 0.5×10⁻⁵ M (inclusive); or about 0.5×10⁻⁵ M to about 1×10⁻⁵ M (inclusive), e.g., as measured in phosphate buffered saline using surface plasmon resonance (SPR).

[0861] In some embodiments, any of the antibodies or antigen-binding fragments described herein has a K_{off} of about 1×10⁻⁶ s⁻¹ to about 1×10⁻³ s⁻¹, about 0.5×10⁻³ s⁻¹, about 1×10⁻⁴ s⁻¹, about 0.5×10⁻⁴ s⁻¹, about 1×10⁻⁵ s⁻¹, or about 0.5×10⁻⁵ s⁻¹ (inclusive); about 0.5×10⁻⁵ s⁻¹ to about 1×10⁻³ s⁻¹, about 0.5×10⁻³ s⁻¹, about 1×10⁻⁴ s⁻¹, about 0.5×10⁻⁴ s⁻¹, or about 1×10⁻⁵ s⁻¹ (inclusive); about 1×10⁻⁵ s⁻¹ to about 1×10⁻³ s⁻¹, about 0.5×10⁻³ s⁻¹, about 1×10⁻⁴ s⁻¹, or about 0.5×10⁻⁴ s⁻¹ (inclusive); about 0.5×10⁻⁴ s⁻¹ to about 1×10⁻³ s⁻¹, about 0.5×10⁻³ s⁻¹, or about 1×10⁻⁴ s⁻¹ (inclusive); about 1×10⁻⁴ s⁻¹ to about 1×10⁻³ s⁻¹, or about 0.5×10⁻³ s⁻¹ (inclusive); or about 0.5×10⁻⁵ s⁻¹ to about 1×10⁻³ s⁻¹ (inclusive), e.g., as measured in phosphate buffered saline using surface plasmon resonance (SPR).

[0862] In some embodiments, any of the antibodies or antigen-binding fragments described herein has a Kₒₙ of about 1×10² M⁻¹s⁻¹ to about 1×10⁶ M⁻¹s⁻¹, about 0.5×10⁶ M⁻¹s⁻¹, about 1×10⁵ M⁻¹s⁻¹, about 0.5×10⁵ M⁻¹s⁻¹, about 1×10⁴ M⁻¹s⁻¹, about 0.5×10⁴ M⁻¹s⁻¹, about 1×10³ M⁻¹s⁻¹, or about 0.5×10³ M⁻¹s⁻¹ (inclusive); about 0.5×10³ M⁻¹s⁻¹ to about 1×10⁶ M⁻¹s⁻¹, about 0.5×10⁶ M⁻¹s⁻¹, about 1×10⁵ M⁻¹s⁻¹, about 0.5×10⁵ M⁻¹s⁻¹, about 1×10⁴ M⁻¹s⁻¹, about 0.5×10⁴ M⁻¹s⁻¹, or about 1×10³ M⁻¹s⁻¹ (inclusive); about 1×10³ M⁻¹s⁻¹ to about 1×10⁶ M⁻¹ s⁻¹, about 0.5×10⁶ M⁻¹s⁻¹, about 1×10⁵ M⁻¹s⁻¹, about 0.5×10⁵ M⁻¹s⁻¹, about 1×10⁴ M⁻¹s⁻¹, or about 0.5×10⁴ M⁻¹s⁻¹ (inclusive); about 0.5×10⁴ M⁻¹s⁻¹ to about 1×10⁶ M⁻¹s⁻¹, about 0.5×10⁶ M⁻¹s⁻¹, about 1×10⁵ M⁻¹s⁻¹, about 0.5×10⁵ M⁻¹s⁻¹, or about 1×10⁴ M⁻¹s⁻¹ (inclusive); about 1×10⁴ M⁻¹s⁻¹ to about 1×10⁶ M⁻¹s⁻¹, about 0.5×10⁶ M⁻¹s⁻¹, about 1×10⁵ M⁻¹s⁻¹, or about 0.5×10⁵ M⁻¹s⁻¹ (inclusive); about 0.5×10⁵ M⁻¹s⁻¹ to about 1×10⁶ M⁻¹s⁻¹, about 0.5×10⁶ M⁻¹s⁻¹, or about 1×10⁵ M⁻¹s⁻¹ (inclusive); about 1×10⁵ M⁻¹s⁻¹ to about 1×10⁶ M⁻¹s⁻¹, or about 0.5×10⁶ M⁻¹s⁻¹ (inclusive); or about 0.5×10⁶ M⁻¹s⁻¹ to about 1×10⁶ M⁻¹s⁻¹ (inclusive), e.g., as measured in phosphate buffered saline using surface plasmon resonance (SPR).

[0863] Additional examples of CXCL10 inhibitors that are antibodies or antigen-binding antibody fragments are known in the art.

### CCL11 Inhibitors

[0864] The term “CCL11 inhibitor” refers to an agent which decreases the ability of CCL11 to bind to one or more of CCR2, CCR3, and CCR5.

[0865] In some embodiments, the CCL11 inhibitor can decrease the binding between CCL11 and CCR2 by blocking the ability of CCL11 to interact with CCR2. In some embodiments, the CCL11 inhibitor can decrease the binding between CCL11 and CCR3 by blocking the ability of CCL11 to interact with CCR3. In some embodiments, the CCL11 inhibitor can decrease the binding between CCL11 and CCR5 by blocking the ability of CCL11 to interact with CCR5.

[0866] In some embodiments, a CCL11 inhibitor is an antibody or an antigen-binding fragment thereof.

[0867] Exemplary sequences for human CCL11, human CCR2, human CCR3, and human CCR5 are shown below.

Human CCL11
(SEQ ID NO: 185)
mkvsaallwl lliaaafspq glagpasvpt tccfnlanrk
iplqrlesyr ritsgkcpqk avifktklak dicadpkkkw
vqdsmkyldq ksptpkp
Human CCR2 Isoform A
(SEQ ID NO: 186)
mlstsrsrfi rntnesgeev ttffdydyga pchkfdvkqi
gaqllpplys lvfifgfvgn mlvvlilinc kklkcltdiy
llnlaisdll flitlplwah saanewvfgn amcklftgly
higyfggiff iilltidryl aivhavfalk artvtfgvvt
svitwlvavf asvpgiiftk cqkedsvyvc gpyfprgwnn
fhtimrnilg lvlpllimvi cysgilktll rcrnekkrhr
avrviftimi vyflfwtpyn ivillntfqe ffglsncest
sqldqatqvt etlgmthcci npiiyafvge kfrslfhial
gcriaplqkp vcggpgvrpg knvkvttqgl ldgrgkgksi
grapeaslqd kega
Human CCR2 Isoform B
(SEQ ID NO: 187)
mlstsrsrfi rntnesgeev ttffdydyga pchkfdvkqi
gaqllpplys lvfifgfvgn mlvvlilinc kklkcltdiy
llnlaisdll flitlplwah saanewvfgn amcklftgly
higyfggiff iilltidryl aivhavfalk artvtfgvvt
svitwlvavf asvpgiiftk cqkedsvyvc gpyfprgwnn
fhtimrnilg lvlpllimvi cysgilktll rcrnekkrhr
avrviftimi vyflfwtpyn ivillntfqe ffglsncest
sqldqatqvt etlgmthcci npiiyafvge kfrrylsvff
rkhitkrfck qcpvfyretv dgvtstntps tgeqevsagl
Human CCR3 Isoform 1
(SEQ ID NO: 188)
mttsldtvet fgttsyyddv gllcekadtr almaqfvppl
yslvftvgll gnvvvymili kyrrlrimtn iyllnlaisd
llflvtlpfw ihyvrghnwv fghgmcklls gfyhtglyse
iffiilltid rylaivhavf alrartvtfg vitsivtwgl
avlaalpefi fyeteelfee tlcsalyped tvyswrhfht
lrmtifclvl pllvmaicyt giiktllrcp skkkykairl
ifvimavffi fwtpynvail lssyqsilfg ndcerskhld
lvmlvtevia yshccmnpvi yafvgerfrk ylrhffhrhl
lmhlgryipf lpseklerts svspstaepe lsivf
Human CCR3 Isoform 2
(SEQ ID NO: 189)
mpfgirmllr ahkpgssrrs emttsldtve tfgttsyydd
vgllcekadt ralmaqfvpp lyslvftvgl lgnvvvvmil
ikyrrlrimt niyllnlais dllflvtlpf wihyvrghnw
vfghgmckll sgfyhtglys eiffiillti drylaivhav
falrartvtf gvitsivtwg lavlaalpef ifyeteelfe
etlcsalype dtvyswrhfh tlrmtifclv lpllvmaicy
tgiiktllrc pskkkykair lifvimavff ifwtpynvai
llssyqsilf gndcerskhl dlvmlvtevi ayshccmnpv
iyafvgerfr kylrhffhrh llmhlgryip flpseklert
ssvspstaep elsivf
Human CCR3 Isoform 3
(SEQ ID NO: 190)
mpfgirmllr ahkpgrsemt tsldtvetfg ttsyyddvgl
lcekadtral maqfvpplys lvftvgllgn vvvvmiliky
rrlrimtniy llnlaisdll flvtlpfwih yvrghnwvfg
hgmckllsgf yhtglyseif fiilltidry laivhavfal
rartvtigvi tsivtwglav laalpefify eteeffeetl
csalypedtv yswrhfhtlr mtifclvlpl lvmaicytgi
iktllrcpsk kkykairlif vimavffifw tpynvaills
syqsilfgnd cerskhldlv mlvteviays hccmnpviya
fvgerfrkyl rhffhrhllm hlgryipflp seklertssv
spstaepels ivf
Human CCR5
(SEQ ID NO: 191)
[sequence omitted]

### CCL11 Inhibitors—Antibodies

[0868] In some embodiments, the CCL11 inhibitor is an antibody or an antigen-binding fragment thereof (e.g., a Fab or a scFv). In some embodiments, an antibody or antigen-binding fragment described herein binds specifically to CCL11, CCR2, CCR3, or CCR5, or can specifically bind to two or more of CCL11, CCR2, CCR3, and CCR5. In some embodiments, a CCL11 inhibitor can bind to two or more of CCR2, CCR3, and CCR5.

[0869] In some embodiments, the antibody can be a humanized antibody, a chimeric antibody, a multivalent antibody, or a fragment thereof. In some embodiments, an antibody can be a scFv-Fc (Sokolowska-Wedzina et al., Mol. Cancer Res. 15(8):1040-1050, 2017), a VHH domain (Li et al., Immunol. Lett. 188:89-95, 2017), a VNAR domain (Hasler et al., Mol. Immunol. 75:28-37, 2016), a (scFv)₂, a minibody (Kim et al., PLoS One 10(1):e113442, 2014), or a BiTE. In some embodiments, an antibody can be a DVD-Ig (Wu et al., Nat. Biotechnol. 25(11):1290-1297, 2007; WO 08/024188; WO 07/024715), and a dual-affinity re-targeting antibody (DART) (Tsai et al., Mol. Ther. Oncolytics 3:15024, 2016), a triomab (Chelius et al., MAbs 2(3):309-319, 2010), kih IgG with a common LC (Kontermann et al., Drug Discovery Today 20(7):838-847, 2015), a crossmab (Regula et al., EMBO Mol. Med. 9(7):985, 2017), an ortho-Fab IgG (Kontermann et al., Drug Discovery Today 20(7):838-847, 2015), a 2-in-1-IgG (Kontermann et al., Drug Discovery Today 20(7):838-847, 2015), IgG-scFv (Cheal et al., Mol. Cancer Ther. 13(7):1803-1812, 2014), scFv2-Fc (Natsume et al., J. Biochem. 140(3):359-368, 2006), a bi-nanobody (Kontermann et al., Drug Discovery Today 20(7):838-847, 2015), tanden antibody (Kontermann et al., Drug Discovery Today 20(7):838-847, 2015), a DART-Fc (Kontermann et al., Drug Discovery Today 20(7):838-847, 2015), a scFv-HSA-scFv (Kontermann et al., Drug Discovery Today 20(7):838-847, 2015), DNL-Fab3 (Kontermann et al., Drug Discovery Today 20(7):838-847, 2015), DAF (two-in-one or four-in-one), DutaMab, DT-IgG, knobs-in-holes common LC, knobs-in-holes assembly, charge pair antibody, Fab-arm exchange antibody, SEEDbody, Triomab, LUZ-Y, Fcab, kλ-body, orthogonal Fab, DVD-IgG, IgG(H)-scFv, scFv-(H)IgG, IgG(L)-scFv, scFv-(L)-IgG, IgG (L,H)-Fc, IgG(H)-V, V(H)-IgG, IgG(L)-V, V(L)-IgG, KIH IgG-scFab, 2scFv-IgG, IgG-2scFv, scFv4-Ig, Zybody, DVI-IgG, nanobody (e.g., antibodies derived from Camelus bactriamus, Calelus dromaderius, or Lama paccos) (U.S. Pat. No. 5,759,808; Stijlemans et al., J. Biol. Chem. 279:1256-1261, 2004; Dumoulin et al., Nature 424:783-788, 2003; and Pleschberger et al., Bioconjugate Chem. 14:440-448, 2003), nanobody-HSA, a diabody (e.g., Poljak, Structure 2(12):1121-1123, 1994; Hudson et al., J. Immunol. Methods 23(1-2):177-189, 1999), a TandAb (Reusch et al., mAbs 6(3):727-738, 2014), scDiabody (Cuesta et al., Trends in Biotechnol. 28(7):355-362, 2010), scDiabody-CH3 (Sanz et al., Trends in Immunol. 25(2):85-91, 2004), Diabody-CH3, Triple Body, miniantibody, minibody, TriBi minibody, scFv-CH3 KIH, Fab-scFv, scFv-CH-CL-scFv, F(ab′)2-scFV2, scFv-KIH, Fab-scFv-Fc, tetravalent HCAb, scDiabody-Fc, diabody-Fc, tandem scFv-Fc, intrabody (Huston et al., Human Antibodies 10(3-4):127-142, 2001; Wheeler et al., Mol. Ther. 8(3):355-366, 2003; and Stocks, Drug Discov. Today 9(22):960-966, 2004), dock and lock bispecific antibody, ImmTAC, HSAbody, scDiabody-HSA, tandem scFv, IgG-IgG, Cov-X-Body, and scFv1-PEG-scFv2.

[0870] Non-limiting examples of an antigen-binding fragment of an antibody include an Fv fragment, a Fab fragment, a F(ab′)₂ fragment, and a Fab′ fragment. Additional examples of an antigen-binding fragment of an antibody is an antigen-binding fragment of an IgG (e.g., an antigen-binding fragment of IgG1, IgG2, IgG3, or IgG4) (e.g., an antigen-binding fragment of a human or humanized IgG, e.g., human or humanized IgG1, IgG2, IgG3, or IgG4); an antigen-binding fragment of an IgA (e.g., an antigen-binding fragment of IgA1 or IgA2) (e.g., an antigen-binding fragment of a human or humanized IgA, e.g., a human or humanized IgA1 or IgA2); an antigen-binding fragment of an IgD (e.g., an antigen-binding fragment of a human or humanized IgD); an antigen-binding fragment of an IgE (e.g., an antigen-binding fragment of a human or humanized IgE); or an antigen-binding fragment of an IgM (e.g., an antigen-binding fragment of a human or humanized IgM).

[0871] In some embodiments, an antibody can be an IgNAR, a bispecific antibody (Milstein and Cuello, Nature 305:537-539, 1983; Suresh et al., Methods in Enzymology 121:210, 1986; WO 96/27011; Brennan et al., Science 229:81, 1985; Shalaby et al., J. Exp. Med. 175:217-225, 1992; Kolstelny et al., J. Immunol. 148(5):1547-1553, 1992; Hollinger et al., Proc. Nat. Acad. Sci. U.S.A. 90:6444-6448, 1993; Gruber et al., J. Immunol. 152:5368, 1994; and Tutt et al., J. Immunol. 147:60, 1991), a bispecific diabody, a triabody (Schoonooghe et al., BMC Biotechnol. 9:70, 2009), a tetrabody, scFv-Fc knobs-into-holes, a scFv-Fc-scFv, a (Fab′scFv)₂, a V-IgG, a IvG-V, a dual V domain IgG, a heavy chain immunoglobulin or a camelid (Holt et al., Trends Biotechnol. 21(11):484-490, 2003), an intrabody, a monoclonal antibody (e.g., a human or humanized monoclonal antibody), a heteroconjugate antibody (e.g., U.S. Pat. No. 4,676,980), a linear antibody (Zapata et al., Protein Eng. 8(10:1057-1062, 1995), a trispecific antibody (Tutt et al., J. Immunol. 147:60, 1991), a Fabs-in-Tandem immunoglobulin (WO 15/103072), or a humanized camelid antibody.

[0872] In some embodiments, the antibody is a humanized antibody, a chimeric antibody, a multivalent antibody, or a fragment thereof. In some embodiments, the antibody is a monoclonal antibody. In some embodiments, the antibody is a humanized monoclonal antibody. See e.g., Hunter & Jones, Nat. Immunol. 16:448-457, 2015; and Heo et al., Oncotarget 7(13):15460-15473, 2016. Additional examples of antibodies and antigen-binding fragments thereof are described in U.S. Pat. Nos. 8,440,196; 7,842,144; 8,034,344; and 8,529,895; US 2013/0317203; US 2014/0322239; US 2015/0166666; US 2016/0152714; and US 2017/0002082, each of which is incorporated by reference in its entirety.

[0873] In some examples the chemokine/chemokine receptor inhibitor is bertilimumab (Immune Pharmaceuticals), an anti-eotaxin-1 monoclonal antibody that targets CCL11, and is currently in a Phase II clinical study for ulcerative colitis. Additional examples of CCL11 inhibitors are described in U.S. Patent Application Publication Nos. 2016/0289329, 2015/0086546, 2014/0342450, 2014/0178367, 2013/0344070, 2013/0071381, 2011/0274696, 2011/0038871, 2010/0074886, 2009/0297502, 2009/0191192, 2009/0169541, 2009/0142339, 2008/0268536, 2008/0241923, 2008/0241136, 2005/0260139, 2005/0048052, 2004/0265303, 2004/0132980, 2004/0126851, 2003/0165494, 2002/0150576, 2002/0150570, 2002/0051782, 2002/0051781, 2002/0037285, 2002/0028436, 2002/0015700, 2002/0012664, 2017/0131282, 2016/0368979, 2016/0208011, 2011/0268723, 2009/0123375, 2007/0190055, 2017/0049884, 2011/0165182, 2009/0226434, 2009/0110686, 2009/0047735, 2009/0028881, 2008/0107647, 2008/0107595, 2008/0015348, 2007/0274986, 2007/0231327, 2007/0036796, 2007/0031408, 2006/0229336, 2003/0228306, 2003/0166870, 2003/0003440, 2002/0019345, and 2001/0000241, each of which is incorporated by reference in its entirety (e.g., the description of CCL11 inhibitors).

[0874] In some embodiments, any of the antibodies or antigen-binding fragments described herein has a dissociation constant (K_{D}) of less than 1×10⁻⁵ M (e.g., less than 0.5×10⁻⁵ M, less than 1×10⁻⁶ M, less than 0.5×10⁻⁶ M, less than 1×10⁻⁷ M, less than 0.5×10⁻⁷ M, less than 1×10⁻⁸ M, less than 0.5×10⁻⁸ M, less than 1×10⁻⁹ M, less than 0.5×10⁻⁹ M, less than 1×10⁻¹⁰ M, less than 0.5×10⁻¹⁰ M, less than 1×10⁻¹¹ M, less than 0.5×10⁻¹¹ M, or less than 1×10⁻¹² M), e.g., as measured in phosphate buffered saline using surface plasmon resonance (SPR).

[0875] In some embodiments, any of the antibodies or antigen-binding fragments described herein has a K_{D} of about 1×10⁻¹² M to about 1×10⁻⁵ M, about 0.5×10⁻⁵ M, about 1×10⁻⁶ M, about 0.5×10⁻⁶ M, about 1×10⁻⁷ M, about 0.5×10⁻⁷ M, about 1×10⁻⁸ M, about 0.5×10⁻⁸ M, about 1×10⁻⁹ M, about 0.5×10⁻⁹ M, about 1×10⁻¹⁰ M, about 0.5×10⁻¹⁰ M, about 1×10⁻¹¹ M, or about 0.5×10⁻¹¹ M (inclusive); about 0.5×10⁻¹¹ M to about 1×10⁻⁵ M, about 0.5×10⁻⁵ M, about 1×10⁻⁶ M, about 0.5×10⁻⁶ M, about 1×10⁻⁷ M, about 0.5×10⁻⁷ M, about 1×10⁻⁸ M, about 0.5×10⁻⁸ M, about 1×10⁻⁹ M, about 0.5×10⁻⁹ M, about 1×10⁻¹⁰ M, about 0.5×10⁻¹⁰ M, or about 1×10⁻¹¹ M (inclusive); about 1×10⁻¹¹ M to about 1×10⁻⁵ M, about 0.5×10⁻⁵ M, about 1×10⁻⁶ M, about 0.5×10⁻⁶ M, about 1×10⁻⁷ M, about 0.5×10⁻⁷ M, about 1×10⁻⁸ M, about 0.5×10⁻⁸ M, about 1×10⁻⁹ M, about 0.5×10⁻⁹ M, about 1×10⁻¹⁰ M, or about 0.5×10⁻¹⁰ M (inclusive); about 0.5×10⁻¹⁰ M to about 1×10⁻⁵ M, about 0.5×10⁻⁵ M, about 1×10⁻⁶ M, about 0.5×10⁻⁶ M, about 1×10⁻⁷ M, about 0.5×10⁻⁷ M, about 1×10⁻⁸ M, about 0.5×10⁻⁸ M, about 1×10⁻⁹ M, about 0.5×10⁻⁹ M, or about 1×10⁻¹⁰ M (inclusive); about 1×10⁻¹⁰ M to about 1×10⁻⁵ M, about 0.5×10⁻⁵ M, about 1×10⁻⁶ M, about 0.5×10⁻⁶ M, about 1×10⁻⁷ M, about 0.5×10⁻⁷ M, about 1×10⁻⁸ M, about 0.5×10⁻⁸ M, about 1×10⁻⁹ M, or about 0.5×10⁻⁹ M (inclusive); about 0.5×10⁻⁹ M to about 1×10⁻⁵ M, about 0.5×10⁻⁵ M, about 1×10⁻⁶ M, about 0.5×10⁻⁶ M, about 1×10⁻⁷ M, about 0.5×10⁻⁷ M, about 1×10⁻⁸ M, about 0.5×10⁻⁸ M, or about 1×10⁻⁹ M (inclusive); about 1×10⁻⁹ M to about 1×10⁻⁵ M, about 0.5×10⁻⁵ M, about 1×10⁻⁶ M, about 0.5×10⁻⁶ M, about 1×10⁻⁷ M, about 0.5×10⁻⁷ M, about 1×10⁻⁸ M, or about 0.5×10⁻⁸ M (inclusive); about 0.5×10 M to about 1×10⁻⁵ M, about 0.5×10⁻⁵ M, about 1×10⁻⁶ M, about 0.5×10⁻⁶ M, about 1×10⁻⁷ M, about 0.5×10⁻⁷ M, or about 1×10⁻⁸ M (inclusive); about 1×10⁻⁸ M to about 1×10⁻⁵ M, about 0.5×10⁻⁵ M, about 1×10⁻⁶ M, about 0.5×10⁻⁶ M, about 1×10⁻⁷ M, or about 0.5×10⁻⁷ M (inclusive); about 0.5×10⁻⁷ M to about 1×10⁻⁵ M, about 0.5×10⁻⁵ M, about 1×10⁻⁶ M, about 0.5×10⁻⁶ M, or about 1×10⁻⁷ M (inclusive); about 1×10⁻⁷ M to about 1×10⁻⁵ M, about 0.5×10⁻⁵ M, about 1×10⁻⁶ M, or about 0.5×10⁻⁶ M (inclusive); about 0.5×10⁻⁶ M to about 1×10⁻⁵ M, about 0.5×10⁻⁵ M, or about 1×10⁻⁶ M (inclusive); about 1×10⁻⁶ M to about 1×10⁻⁵ M or about 0.5×10⁻⁵ M (inclusive); or about 0.5×10⁻⁵ M to about 1×10⁻⁵ M (inclusive), e.g., as measured in phosphate buffered saline using surface plasmon resonance (SPR).

[0876] In some embodiments, any of the antibodies or antigen-binding fragments described herein has a K_{off} of about 1×10⁻⁶ s⁻¹ to about 1×10⁻³ s⁻¹, about 0.5×10⁻³ s⁻¹, about 1×10⁻⁴ s⁻¹, about 0.5×10⁻⁴ s⁻¹, about 1×10⁻⁵ s⁻¹, or about 0.5×10⁻⁵ s⁻¹ (inclusive); about 0.5×10⁻⁵ s⁻¹ to about 1×10⁻³ s⁻¹, about 0.5×10⁻³ s⁻¹, about 1×10⁻⁴ s⁻¹, about 0.5×10⁻⁴ s⁻¹, or about 1×10⁻⁵ s⁻¹ (inclusive); about 1×10⁻⁵ s⁻¹ to about 1×10⁻³ s⁻¹, about 0.5×10⁻³ s⁻¹, about 1×10⁻⁴ s⁻¹, or about 0.5×10⁻⁴ s⁻¹ (inclusive); about 0.5×10⁻⁴ s⁻¹ to about 1×10⁻³ s⁻¹, about 0.5×10⁻³ s⁻¹, or about 1×10⁻⁴ s⁻¹ (inclusive); about 1×10⁻⁴ s⁻¹ to about 1×10⁻³ s⁻¹, or about 0.5×10⁻³ s⁻¹ (inclusive); or about 0.5×10⁻⁵ s⁻¹ to about 1×10⁻³ s⁻¹ (inclusive), e.g., as measured in phosphate buffered saline using surface plasmon resonance (SPR).

[0877] In some embodiments, any of the antibodies or antigen-binding fragments described herein has a Kₒₙ of about 1×10² M⁻¹s⁻¹ to about 1×10⁶ M⁻¹s⁻¹, about 0.5×10⁶ M⁻¹s⁻¹, about 1×10⁵ M⁻¹s⁻¹, about 0.5×10⁵ M⁻¹s⁻¹, about 1×10⁴ M⁻¹s⁻¹, about 0.5×10⁴ M⁻¹s⁻¹, about 1×10³ M⁻¹s⁻¹, or about 0.5×10³ M⁻¹s⁻¹ (inclusive); about 0.5×10³ M⁻¹s⁻¹ to about 1×10⁶ M⁻¹s⁻¹, about 0.5×10⁶ M⁻¹s⁻¹, about 1×10⁵ M⁻¹s⁻¹, about 0.5×10⁵ M⁻¹s⁻¹, about 1×10⁴ M⁻¹s⁻¹, about 0.5×10⁴ M⁻¹s⁻¹, or about 1×10³ M⁻¹s⁻¹ (inclusive); about 1×10³ M⁻¹s⁻¹ to about 1×10⁶ M⁻¹s⁻¹, about 0.5×10⁶ M⁻¹s⁻¹, about 1×10⁵ M⁻¹s⁻¹, about 0.5×10⁵ M⁻¹s⁻¹, about 1×10⁴ M⁻¹s⁻¹, or about 0.5×10⁴ M⁻¹s⁻¹ (inclusive); about 0.5×10⁴ M⁻¹s⁻¹ to about 1×10⁶ M⁻¹s⁻¹, about 0.5×10⁶ M⁻¹s⁻¹, about 1×10⁵ M⁻¹s⁻¹, about 0.5×10⁵ M⁻¹s⁻¹, or about 1×10⁴ M⁻¹s⁻¹ (inclusive); about 1×10⁴ M⁻¹s⁻¹ to about 1×10⁶ M⁻¹s⁻¹, about 0.5×10⁶ M⁻¹s⁻¹, about 1×10⁵ M⁻¹s⁻¹, or about 0.5×10⁵ M⁻¹s⁻¹ (inclusive); about 0.5×10⁵ M⁻¹s⁻¹ to about 1×10⁶ M⁻¹s⁻¹, about 0.5×10⁶ M⁻¹s⁻¹, or about 1×10⁵ M⁻¹s⁻¹ (inclusive); about 1×10⁵ M⁻¹s⁻¹ to about 1×10⁶ M⁻¹s⁻¹, or about 0.5×10⁶ M⁻¹s⁻¹ (inclusive); or about 0.5×10⁶ M⁻¹s⁻¹ to about 1×10⁶ M⁻¹s⁻¹ (inclusive), e.g., as measured in phosphate buffered saline using surface plasmon resonance (SPR).

[0878] Additional examples of CCL11 inhibitors that are antibodies or antigen-binding antibody fragments are known in the art.

### CXCL10 Inhibitors—Small Molecules and Peptides

[0879] In some instances, the CXCL10 inhibitor is a small molecule. For example, the CXCL10 inhibitor can be ganodermycin (see, e.g., Jung et al., J. Antiobiotics 64:683-686, 2011). Additional exemplary small molecule CXCL10 inhibitors are described in: U.S. Patent Application Publication No. 2005/0075333; U.S. Patent Application Publication No. 2004/0242498; U.S. Patent Application Publication No. 2003/0069234; U.S. Patent Application Publication No. 2003/0055054; U.S. Patent Application Publication No. 2002/0169159; WO 97/24325; WO 98/38167; WO 97/44329; WO 98/04554; WO 98/27815; WO 98/25604; WO 98/25605; WO 98/25617; WO 98/31364; Hesselgesser et al., J. Biol. Chem. 273(25):15687-15692 (1998); and Howard et al., J. Med. Chem. 41(13):2184-2193 (1998).

[0880] In some examples, the CXCL10 inhibitor is a peptide antagonist of a CXCR3 receptor (e.g., as described in U.S. Patent Application Publication No. 2007/0116669, 2006/0204498, and WO 98/09642). In some examples, the CXCL10 inhibitor is a chemokine mutant or analogue, e.g., those described in U.S. Pat. No. 5,739,103, WO 96/38559, and WO 98/06751. Additional examples of CXCL10 inhibitors that are small molecules or peptides are known in the art.

### CCR2 Inhibitors

[0881] As used herein “CCR2,” “CC chemokine receptor 2,” or “MCP-1” can be used interchangeably. CCL2, CCL8, and CCL16 each individually bind to CCR2.

[0882] The term “CCR2 inhibitor” refers to an agent which decreases the ability of CCR2 to bind to one or more (e.g., two, or three) of CCL2, CCL8, and CCL16.

[0883] In some embodiments, the CCR2 inhibitor can decrease the binding between CCL2 and CCR2 by blocking the ability of CCL2 to interact with CCR2. In some embodiments, the CCR2 inhibitor can decrease the binding between CCL8 and CCR2 by blocking the ability of CCL8 to interact with CCR2. In some embodiments, the CCR2 inhibitor can decrease the binding between CCL16 and CCR2 by blocking the ability of CCL16 to interact with CCR2.

[0884] In some embodiments, the CCR2 inhibitor decreases the ability of CCR2 to bind to each of CCL2 and CCL8. In some embodiments, the CCR2 inhibitor decreases the ability of CCR2 to bind to each of CCL2 and CCL16. In some embodiments, the CCR2 inhibitor decreases the ability of CCR2 to bind to each of CCL8 and CCL16. In some embodiments, the CCRS inhibitor decreases the ability of CCR2 to bind to each of CCL2, CCL8, and CCL16.

[0885] In some instances, the CCR2 inhibitor is a small molecule. In some instances, the CCR2 inhibitor is an antibody or an antigen-binding antibody fragment. In some instances, the CCR2 inhibitor is a peptide.

[0886] Exemplary sequences for human CCR2, human CCL2, human CCL8, and human CCL16 are shown below.

Human CCR2 Isoform A
(SEQ ID NO: 192)
mlstsrsrfi rntnesgeev ttffdydyga pchkfdvkqi
gaqllpplys lvfifgfvgn mlvvlilinc kklkcltdiy
llnlaisdll flitlplwah saanewvfgn amcklftgly
higyfggiff iilltidryl aivhavfalk artvtfgvvt
svitwlvavf asvpgiiftk cqkedsvyvc gpyfprgwnn
fhtimrnilg lvlpllimvi cysgilktll rcrnekkrhr
avrviftimi vyflfwtpyn ivillntfqe ffglsncest
sqldqatqvt etlgmthcci npiiyafvge kfrslfhial
gcriaplqkp vcggpgvrpg knvkvttqgl ldgrgkgksi
grapeaslqd kega
Human CCL2 Isoform B
(SEQ ID NO: 193)
mlstsrsrfi rntnesgeev ttffdydyga pchkfdvkqi
gaqllpplys lvfifgfvgn mlvvlilinc kklkcltdiy
llnlaisdll flitlplwah saanewvfgn amcklftgly
higyfggiff iilltidryl aivhavfalk artvtfgvvt
svitwlvavf asvpgiiftk cqkedsvyvc gpyfprgwnn
fhtimrnilg lvlpilimvi cysgilktll rcrnekkrhr
avrviftimi vyflfwtpyn ivillntfqe ffglsncest
sqldqatqvt etlgmthcci npiiyafvge kfrrylsvff
rkhitkrfck qcpvfyretv dgvtstntps tgeqevsagl
Human CCL8
(SEQ ID NO: 194)
qpdsvsi pitccfnvin rkipiqrles ytritniqcp
keavifktkr gkevcadpke rwvrdsmkhl dqifqnlkp
Human CCL16
(SEQ ID NO: 195)
qpkvpew vntpstcclk yyekvlprrl vvgyrkalnc
hlpaiifvtk rnrevanpn ddwvqeyikd pnlpllptrn
lstvkiitak ngqpqllnsq

### CCR2 Inhibitors—Antibodies

[0887] In some embodiments, the CCR2 inhibitor is an antibody or an antigen-binding fragment thereof (e.g., a Fab or a scFv). In some embodiments, an antibody or antigen-binding fragment described herein binds specifically to CCR2. In some embodiments, an antibody or antigen-binding fragment described herein binds specifically to CCL2. In some embodiments, an antibody or antigen-binding fragment described herein binds specifically to CCL8. In some embodiments, an antibody or antigen-binding fragment described herein binds specifically to CCL16. In some embodiments, an antibody or antigen-binding fragment described herein binds specifically to CCR2 and one or more of (e.g., one, two, or three) of CCL2, CCL8, and CCL16.

[0888] In some embodiments, the antibody can be a humanized antibody, a chimeric antibody, a multivalent antibody, or a fragment thereof. In some embodiments, an antibody can be a scFv-Fc (Sokolowska-Wedzina et al., Mol. Cancer Res. 15(8):1040-1050, 2017), a VHH domain (Li et al., Immunol. Lett. 188:89-95, 2017), a VNAR domain (Hasler et al., Mol. Immunol. 75:28-37, 2016), a (scFv)₂, a minibody (Kim et al., PLoS One 10(1):e113442, 2014), or a BiTE. In some embodiments, an antibody can be a DVD-Ig (Wu et al., Nat. Biotechnol. 25(11):1290-1297, 2007; WO 08/024188; WO 07/024715), and a dual-affinity re-targeting antibody (DART) (Tsai et al., Mol. Ther. Oncolytics 3:15024, 2016), a triomab (Chelius et al., MAbs 2(3):309-319, 2010), kih IgG with a common LC (Kontermann et al., Drug Discovery Today 20(7):838-847, 2015), a crossmab (Regula et al., EMBO Mol. Med. 9(7):985, 2017), an ortho-Fab IgG (Kontermann et al., Drug Discovery Today 20(7):838-847, 2015), a 2-in-1-IgG (Kontermann et al., Drug Discovery Today 20(7):838-847, 2015), IgG-scFv (Cheal et al., Mol. Cancer Ther. 13(7):1803-1812, 2014), scFv2-Fc (Natsume et al., J. Biochem. 140(3):359-368, 2006), a bi-nanobody (Kontermann et al., Drug Discovery Today 20(7):838-847, 2015), tanden antibody (Kontermann et al., Drug Discovery Today 20(7):838-847, 2015), a DART-Fc (Kontermann et al., Drug Discovery Today 20(7):838-847, 2015), a scFv-HSA-scFv (Kontermann et al., Drug Discovery Today 20(7):838-847, 2015), DNL-Fab3 (Kontermann et al., Drug Discovery Today 20(7):838-847, 2015), DAF (two-in-one or four-in-one), DutaMab, DT-IgG, knobs-in-holes common LC, knobs-in-holes assembly, charge pair antibody, Fab-arm exchange antibody, SEEDbody, Triomab, LUZ-Y, Fcab, kλ-body, orthogonal Fab, DVD-IgG, IgG(H)-scFv, scFv-(H)IgG, IgG(L)-scFv, scFv-(L)-IgG, IgG (L,H)-Fc, IgG(H)-V, V(H)-IgG, IgG(L)-V, V(L)-IgG, KIH IgG-scFab, 2scFv-IgG, IgG-2scFv, scFv4-Ig, Zybody, DVI-IgG, nanobody (e.g., antibodies derived from Camelus bactriamus, Calelus dromaderius, or Lama paccos) (U.S. Pat. No. 5,759,808; Stijlemans et al., J. Biol. Chem. 279:1256-1261, 2004; Dumoulin et al., Nature 424:783-788, 2003; and Pleschberger et al., Bioconjugate Chem. 14:440-448, 2003), nanobody-HSA, a diabody (e.g., Poljak, Structure 2(12):1121-1123, 1994; and Hudson et al., J Immunol. Methods 23(1-2):177-189, 1999), a TandAb (Reusch et al., mAbs 6(3):727-738, 2014), scDiabody (Cuesta et al., Trends in Biotechnol. 28(7):355-362, 2010), scDiabody-CH3 (Sanz et al., Trends in Immunol. 25(2):85-91, 2004), Diabody-CH3, Triple Body, miniantibody, minibody, TriBi minibody, scFv-CH3 KIH, Fab-scFv, scFv-CH-CL-scFv, F(ab′)2-scFV2, scFv-KIH, Fab-scFv-Fc, tetravalent HCAb, scDiabody-Fc, diabody-Fc, tandem scFv-Fc, intrabody (Huston et al., Human Antibodies 10(3-4):127-142, 2001; Wheeler et al., Mol. Ther. 8(3):355-366, 2003; and Stocks, Drug Discov. Today 9(22):960-966, 2004), dock and lock bispecific antibody, ImmTAC, HSAbody, scDiabody-HSA, tandem scFv, IgG-IgG, Cov-X-Body, and scFv1-PEG-scFv2.

[0889] Non-limiting examples of an antigen-binding fragment of an antibody include an Fv fragment, a Fab fragment, a F(ab′)₂ fragment, and a Fab′ fragment. Additional examples of an antigen-binding fragment of an antibody is an antigen-binding fragment of an IgG (e.g., an antigen-binding fragment of IgG1, IgG2, IgG3, or IgG4) (e.g., an antigen-binding fragment of a human or humanized IgG, e.g., human or humanized IgG1, IgG2, IgG3, or IgG4); an antigen-binding fragment of an IgA (e.g., an antigen-binding fragment of IgA1 or IgA2) (e.g., an antigen-binding fragment of a human or humanized IgA, e.g., a human or humanized IgA1 or IgA2); an antigen-binding fragment of an IgD (e.g., an antigen-binding fragment of a human or humanized IgD); an antigen-binding fragment of an IgE (e.g., an antigen-binding fragment of a human or humanized IgE); or an antigen-binding fragment of an IgM (e.g., an antigen-binding fragment of a human or humanized IgM).

[0890] In some embodiments, an antibody can be an IgNAR, a bispecific antibody (Milstein and Cuello, Nature 305:537-539, 1983; Suresh et al., Methods in Enzymology 121:210, 1986; WO 96/27011; Brennan et al., Science 229:81, 1985; Shalaby et al., J. Exp. Med. 175:217-225, 1992; Kolstelny et al., J. Immunol. 148(5):1547-1553, 1992; Hollinger et al., Proc. Nat. Acad. Sci. U.S.A. 90:6444-6448, 1993; Gruber et al., J. Immunol. 152:5368, 1994; and Tutt et al., J. Immunol. 147:60, 1991), a bispecific diabody, a triabody (Schoonooghe et al., BMC Biotechnol. 9:70, 2009), a tetrabody, scFv-Fc knobs-into-holes, a scFv-Fc-scFv, a (Fab′scFv)₂, a V-IgG, a IvG-V, a dual V domain IgG, a heavy chain immunoglobulin or a camelid (Holt et al., Trends Biotechnol. 21(11):484-490, 2003), an intrabody, a monoclonal antibody (e.g., a human or humanized monoclonal antibody), a heteroconjugate antibody (e.g., U.S. Pat. No. 4,676,980), a linear antibody (Zapata et al., Protein Eng. 8(10:1057-1062, 1995), a trispecific antibody (Tutt et al., J. Immunol. 147:60, 1991), a Fabs-in-Tandem immunoglobulin (WO 15/103072), or a humanized camelid antibody.

[0891] In some embodiments, the CCR2 inhibitor is a monoclonal antibody. For example, the CCR2 inhibitor can be MLN1202 (Millennium Pharmaceuticals), C775, STI-B0201, STI-B0211, STI-B0221, STI-B0232, carlumab (CNTO 888; Centocor, Inc.), or STI-B0234, or an antigen-binding fragment thereof. See also, e.g., Vergunst et al., Arthritis Rheum. 58(7):1931-1939, 2008. Additional examples of CCR2 inhibitors that are antibodies or antigen-binding antibody fragments are described in, e.g., U.S. Patent Application Publication Nos. 2015/0086546, 2016/0272702, 2016/0289329, 2016/0083482, 2015/0361167; 2014/0342450, 2014/0178367, 2013/0344070, 2013/0071381, 2011/0274696, 2011/0059107, 2011/0038871, 2009/0068109, 2009/0297502, 2009/0142339, 2008/0268536, 2008/0241923, 2008/0241136, 2007/0128112, 2007/0116708, 2007/0111259, 2006/0246069, 2006/0039913, 2005/0232923, 2005/0260139, 2005/0058639, 2004/0265303, 2004/0132980, 2004/0126851, 2004/0219644, 2004/0047860, 2003/0165494, 2003/0211105, 2002/0150576, 2002/0051782, 2002/0042370, and 2002/0015700; and U.S. Pat. Nos. 6,312,689, 6,084,075, 6,406,694, 6,406,865, 6,696,550, 6,727,349, 7,442,775, 7,858,318, 5,859,205, 5,693,762, and 6,075,181, each of which is incorporated by reference (e.g., the description of the CCR2 inhibitors). Additional examples of CCR2 inhibitors are described in, e.g., WO 00/05265. Additional examples of CCR2 inhibitors that are antibodies or antigen-binding antibodies fragments are described in, e.g., Loberg et al., Cancer Res. 67(19):9417, 2007.

[0892] In some embodiments, any of the antibodies or antigen-binding fragments described herein has a dissociation constant (K_{D}) of less than 1×10⁻⁵ M (e.g., less than 0.5×10⁻⁵ M, less than 1×10⁻⁶ M, less than 0.5×10⁻⁶ M, less than 1×10⁻⁷ M, less than 0.5×10⁻⁷ M, less than 1×10⁻⁸ M, less than 0.5×10⁻⁸ M, less than 1×10⁻⁹ M, less than 0.5×10⁻⁹ M, less than 1×10⁻¹⁰ M, less than 0.5×10⁻¹⁰ M, less than 1×10⁻¹¹ M, less than 0.5×10⁻¹¹ M, or less than 1×10⁻¹² M), e.g., as measured in phosphate buffered saline using surface plasmon resonance (SPR).

[0893] In some embodiments, any of the antibodies or antigen-binding fragments described herein has a K_{D} of about 1×10⁻¹² M to about 1×10⁻⁵ M, about 0.5×10⁻⁵ M, about 1×10⁻⁶ M, about 0.5×10⁻⁶ M, about 1×10⁻⁷ M, about 0.5×10⁻⁷ M, about 1×10⁻⁸ M, about 0.5×10⁻⁸ M, about 1×10⁻⁹ M, about 0.5×10⁻⁹ M, about 1×10⁻¹⁰ M, about 0.5×10⁻¹⁰ M, about 1×10⁻¹¹ M, or about 0.5×10⁻¹¹ M (inclusive); about 0.5×10⁻¹¹ M to about 1×10⁻⁵ M, about 0.5×10⁻⁵ M, about 1×10⁻⁶ M, about 0.5×10⁻⁶ M, about 1×10⁻⁷ M, about 0.5×10⁻⁷ M, about 1×10⁻⁸ M, about 0.5×10⁻⁸ M, about 1×10⁻⁹ M, about 0.5×10⁻⁹ M, about 1×10⁻¹⁰ M, about 0.5×10⁻¹⁰ M, or about 1×10⁻¹¹ M (inclusive); about 1×10⁻¹¹ M to about 1×10⁻⁵ M, about 0.5×10⁻⁵ M, about 1×10⁻⁶ M, about 0.5×10⁻⁶ M, about 1×10⁻⁷ M, about 0.5×10⁻⁷ M, about 1×10⁻⁸ M, about 0.5×10⁻⁸ M, about 1×10⁻⁹ M, about 0.5×10⁻⁹ M, about 1×10⁻¹⁰ M, or about 0.5×10⁻¹⁰ M (inclusive); about 0.5×10⁻¹⁰ M to about 1×10⁻⁵ M, about 0.5×10⁻⁵ M, about 1×10⁻⁶ M, about 0.5×10⁻⁶ M, about 1×10⁻⁷ M, about 0.5×10⁻⁷ M, about 1×10⁻⁸ M, about 0.5×10⁻⁸ M, about 1×10⁻⁹ M, about 0.5×10⁻⁹ M, or about 1×10⁻¹⁰ M (inclusive); about 1×10⁻¹⁰ M to about 1×10⁻⁵ M, about 0.5×10⁻⁵ M, about 1×10⁻⁶ M, about 0.5×10⁻⁶ M, about 1×10⁻⁷ M, about 0.5×10⁻⁷ M, about 1×10⁻⁸ M, about 0.5×10⁻⁸ M, about 1×10⁻⁹ M, or about 0.5×10⁻⁹ M (inclusive); about 0.5×10⁻⁹ M to about 1×10⁻⁵ M, about 0.5×10⁻⁵ M, about 1×10⁻⁶ M, about 0.5×10⁻⁶ M, about 1×10⁻⁷ M, about 0.5×10⁻⁷ M, about 1×10⁻⁸ M, about 0.5×10⁻⁸ M, or about 1×10⁻⁹ M (inclusive); about 1×10⁻⁹ M to about 1×10⁻⁵ M, about 0.5×10⁻⁵ M, about 1×10⁻⁶ M, about 0.5×10⁻⁶ M, about 1×10⁻⁷ M, about 0.5×10⁻⁷ M, about 1×10⁻⁸ M, or about 0.5×10⁻⁸ M (inclusive); about 0.5×10⁻⁸ M to about 1×10⁻⁵ M, about 0.5×10⁻⁵ M, about 1×10⁻⁶ M, about 0.5×10⁻⁶ M, about 1×10⁻⁷ M, about 0.5×10⁻⁷ M, or about 1×10⁻⁸ M (inclusive); about 1×10⁻⁸ M to about 1×10⁻⁵ M, about 0.5×10⁻⁵ M, about 1×10⁻⁶ M, about 0.5×10⁻⁶ M, about 1×10⁻⁷ M, or about 0.5×10⁻⁷ M (inclusive); about 0.5×10⁻⁷ M to about 1×10⁻⁵ M, about 0.5×10⁻⁵ M, about 1×10⁻⁶ M, about 0.5×10⁻⁶ M, or about 1×10⁻⁷ M (inclusive); about 1×10⁻⁷ M to about 1×10⁻⁵ M, about 0.5×10⁻⁵ M, about 1×10⁻⁶ M, or about 0.5×10⁻⁶ M (inclusive); about 0.5×10⁻⁶ M to about 1×10⁻⁵ M, about 0.5×10⁻⁵ M, or about 1×10⁻⁶ M (inclusive); about 1×10⁻⁶ M to about 1×10⁻⁵ M or about 0.5×10⁻⁵ M (inclusive); or about 0.5×10⁻⁵ M to about 1×10⁻⁵ M (inclusive), e.g., as measured in phosphate buffered saline using surface plasmon resonance (SPR).

[0894] In some embodiments, any of the antibodies or antigen-binding fragments described herein has a K_{off} of about 1×10⁻⁶ s⁻¹ to about 1×10⁻³ s⁻¹, about 0.5×10⁻³ s⁻¹, about 1×10⁻⁴ s⁻¹, about 0.5×10⁻⁴ s⁻¹, about 1×10⁻⁵ s⁻¹, or about 0.5×10⁻⁵ s⁻¹ (inclusive); about 0.5×10⁻⁵ s⁻¹ to about 1×10⁻³ s⁻¹, about 0.5×10⁻³ s⁻¹, about 1×10⁻⁴ s⁻¹, about 0.5×10⁻⁴ s⁻¹, or about 1×10⁻⁵ s⁻¹ (inclusive); about 1×10⁻⁵ s⁻¹ to about 1×10⁻³ s⁻¹, about 0.5×10⁻³ s⁻¹, about 1×10⁻⁴ s⁻¹, or about 0.5×10⁻⁴ s⁻¹ (inclusive); about 0.5×10⁻⁴ s⁻¹ to about 1×10⁻³ s⁻¹, about 0.5×10⁻³ s⁻¹, or about 1×10⁻⁴ s⁻¹ (inclusive); about 1×10⁻⁴ s⁻¹ to about 1×10⁻³ s⁻¹, or about 0.5×10⁻³ s⁻¹ (inclusive); or about 0.5×10⁻⁵ s⁻¹ to about 1×10⁻³ s⁻¹ (inclusive), e.g., as measured in phosphate buffered saline using surface plasmon resonance (SPR).

[0895] In some embodiments, any of the antibodies or antigen-binding fragments described herein has a Kₒₙ of about 1×10² M⁻¹s⁻¹ to about 1×10⁶ M⁻¹s⁻¹, about 0.5×10⁶ M⁻¹s⁻¹, about 1×10⁵ M⁻¹s⁻¹, about 0.5×10⁵ M⁻¹s⁻¹, about 1×10⁴ M⁻¹s⁻¹, about 0.5×10⁴ M⁻¹s⁻¹, about 1×10³ M⁻¹s⁻¹, or about 0.5×10³ M⁻¹s⁻¹ (inclusive); about 0.5×10³ M⁻¹s⁻¹ to about 1×10⁶ M⁻¹s⁻¹, about 0.5×10⁶ M⁻¹s⁻¹, about 1×10⁵ M⁻¹s⁻¹, about 0.5×10⁵ M⁻¹s⁻¹, about 1×10⁴ M⁻¹s⁻¹, about 0.5×10⁴ M⁻¹s⁻¹, or about 1×10³ M⁻¹s⁻¹ (inclusive); about 1×10³ M⁻¹s⁻¹ to about 1×10⁶ M⁻¹s⁻¹, about 0.5×10⁶ M⁻¹s⁻¹, about 1×10⁵ M⁻¹s⁻¹, about 0.5×10⁵ M⁻¹s⁻¹, about 1×10⁴ M⁻¹s⁻¹, or about 0.5×10⁴ M⁻¹s⁻¹ (inclusive); about 0.5×10⁴ M⁻¹s⁻¹ to about 1×10⁶ M⁻¹s⁻¹, about 0.5×10⁶ M⁻¹s⁻¹, about 1×10⁵ M⁻¹s⁻¹, about 0.5×10⁵ M⁻¹s⁻¹, or about 1×10⁴ M⁻¹s⁻¹ (inclusive); about 1×10⁴ M⁻¹s⁻¹ to about 1×10⁶ M⁻¹s⁻¹, about 0.5×10⁶ M⁻¹s⁻¹, about 1×10⁵ M⁻¹s⁻¹, or about 0.5×10⁵ M⁻¹s⁻¹ (inclusive); about 0.5×10⁵ M⁻¹s⁻¹ to about 1×10⁶ M⁻¹s⁻¹, about 0.5×10⁶ M⁻¹s⁻¹, or about 1×10⁵ M⁻¹s⁻¹ (inclusive); about 1×10⁵ M⁻¹s⁻¹ to about 1×10⁶ M⁻¹s⁻¹, or about 0.5×10⁶ M⁻¹s⁻¹ (inclusive); or about 0.5×10⁶ M⁻¹s⁻¹ to about 1×10⁶ M⁻¹s⁻¹ (inclusive), e.g., as measured in phosphate buffered saline using surface plasmon resonance (SPR).

[0896] Additional examples of CCR2 inhibitors that are antibodies or antigen-binding antibody fragments are known in the art.

### CCR2 Inhibitors—Small Molecules and Peptides

[0897] In some examples, the CCR2 inhibitor is a small molecule. For example, the CCR2 inhibitor can be elubrixin, PF-04634817, BMS-741672, or CCX872. See, e.g., U.S. Pat. No. 9,434,766; U.S. Patent Application Publication No. 20070021466; Deerberg et al., Org. Process Rev. Dev. 20(11):1949-1966, 2016; and Morganti et al., J. Neurosci. 35(2):748-760, 2015.

[0898] Additional non-limiting examples of CCR2 inhibitors that are small molecules include, e.g., the phenylamino substituted quaternary salt compounds described in U.S. Patent Application Publication No. 2009/0112004; the biaryl derivatives described in U.S. Patent Application Publication No. 2009/0048238; the pyrazol derivatives described in U.S. Patent Application Publication No. 2009/0029963; the heterocyclic compounds described in U.S. Patent Application Publication No. 2009/0023713; the imidazole derivatives described in U.S. Patent Application Publication No. 2009/0012063; the aminopyrrolidines described in U.S. Patent Application Publication No. 2008/0176883; the heterocyclic cyclopentyl tetrahydroisoquinolones and tetrahydropyridopyridines described in U.S. Patent Application Publication No. 2008/0081803; the heteroaryl sulfonamides described in U.S. Patent Application Publication No. 2010/0056509; the triazolyl pyridyl benzenesulfonamides described in U.S. Patent Application Publication No. 2010/0152186; the bicyclic and bridged nitrogen heterocycles described in U.S. Patent Application Publication No. 2006/0074121; the fused heteroaryl pyridyl and phenyl benzenesulfonamides described in WO 09/009740; and the 3-aminopyrrolidene derivatives described in WO 04/050024.

[0899] Additional non-limiting examples of CCR2 inhibitors include: N-((1R,3S)-3-isopropyl-3-{[3-(trifluoromethyl)-7,8-dihydro-1,6-naph-thyri-din-6(5H)-yl]carbonyl}cyclopentyl)-N-[(3S,4S)-3-methoxytetrahydro-2H-pyran- -4-yl]amine; 3[(3S,4R)-1-((1R,3S)-3-isopropyl-2-oxo-3-{[6-(trifluoromethyl)-2H-1,3-ben-z-oxazin-3(4H)-yl]methyl}cyclopentyl)-3-methylpiperidin-4-yl]benzoic acid; (3S,48)-N-((1R,3S)-3-isopropyl-3-{[7-(trifluoromethyl)-3,4-dihydroisoquin-olin-2(1B)-yl]carbonyl}cyclopentyl)-3-methyltetrahydro-2H-p-yran-4-aminium; 3-[(3S,4R or 3R,4S)-1-((1R,3S)-3-Isopropyl-3-{[6-(trifluoromethyl)-2H-1,3-benzoxazin-3-(4H)-yl]carbonyl}cyclopentyl)-3-methylpiperidin-4-yl]benzoic acid; INCB3284; Eotaxin-3; PF-04178903 (Pfizer), and pharmaceutically acceptable salts thereof.

[0900] Additional non-limiting examples of CCR2 inhibitors include: bindarit (2-((1-benzyl-1H-indazol-3-yl)methoxy)-2-methylpropionic acid); AZD2423 (AstraZeneca); the indole describes described in U.S. Pat. Nos. 7,297,696, 6,962,926, 6,737,435, and 6,569,888; the bicyclic pyrrole derivatives described in U.S. Pat. Nos. 6,441,004 and 6,479,527; the CCR2 inhibitors described in U.S. Patent Application Publications Nos. 2005/0054668, 2005/0026975, 2004/0198719, and 2004/0047860, and Howard et al., Expert Opin. Ther. Patents 11(7):1147-1151 (2001).

[0901] Additional non-limiting examples of CCR2 inhibitors that are small molecules are described in, e.g., WO 97/24325; WO 98/38167; WO 97/44329; WO 98/04554; WO 98/27815; WO 98/25604; WO 98/25605; WO 98/25617; WO 98/31364; Hesselgesser et al., J. Biol. Chem. 273(25):15687-15692, 1998; and Howard et al., J. Med. Chem. 41(13):2184-2193, 1998.

[0902] In some embodiments, the CCR2 inhibitor is a small nucleic acid, e.g., NOX-E36 (a 40-nucleotide L-RNA oligonucleotide that is linked to a 40-kDa PEG; NOXXON Pharma AG).

[0903] In some embodiments, the CCR2 inhibitor is a peptide, e.g., a dominant negative peptide described in, e.g., Kiyota et al., Mol. Ther. 17(5):803-809, 2009, and U.S. Patent Application Publication No. 20070004906, or an antagonistic peptide, e.g., the antagonistic peptides described in WO 05/037305 and Jiang-Hong Gong, et al., J. Exp. Med. 186:131, 1997. Additional examples of CCR2 inhibitors that are peptides are described in, e.g., U.S. Pat. No. 5,739,103; WO 96/38559; WO 98/06751; and WO 98/09642. In some embodiments, a CCR2 inhibitor is a CCR2 mutein (e.g., U.S. Patent Application Publication No. 2004/0185450).

[0904] Additional examples of CCR2 inhibitors that are small molecules and peptides are known in the art.

### CCR9 Inhibitors

[0905] As used herein “CCR9” or “CC chemokine receptor 9” can be used interchangeably. CCR9 specifically binds to CCL25.

[0906] The term “CCR9 inhibitor” refers to an agent which decreases the ability of CCR9 to bind to CCL25.

[0907] In some embodiments, the CCR9 inhibitor can decrease the binding between CCL25 and CCR9 by blocking the ability of CCL25 to interact with CCR9. In some instances, the CCR9 inhibitor is a small molecule. In some instances, the CCR9 inhibitor is an antibody or an antigen-binding antibody fragment.

[0908] Exemplary sequences for human CCR9 and CCL25 are shown below.

Human CCR9 Isoform A
(SEQ ID NO: 196)
mtptdftspi pnmaddygse stssmedyvn fnftdfycek
nnvrqfashf lpplywlvfi vgalgnslvi lvywyctrvk
tmtdmfllnl aiadllflvt lpfwaiaaad qwkfqtfmck
vvnsmykmnf yscvllimci svdryiaiaq amrahtwrek
rllyskmvcf tiwvlaaalc ipeilysqik eesgiaictm
vypsdestkl ksavltlkvi lgfflpfvvm accytiiiht
liqakksskh kalkvtitvl tvfvlsqfpy ncillvqtid
ayamfisnca vstnidicfq vtqtiaffhs clnpvlyvfv
gerfrrdlvk tlknlgcisq aqwvsftrre gslklssmll
ettsgalsl
Human CCR9 Isoform B
(SEQ ID NO: 197)
maddygsest ssmedyvnfn ftdfyceknn vrqfashflp
plywlvfivg algnslvilv ywyctrvktm tdmfllnlai
adllflvtlp fwaiaaadqw kfqtfmckvv nsmykmnfys
cvllimcisv dryiaiaqam rahtwrekrl lyskmvcfti
wvlaaalcip eilysqikee sgiaictmvy psdestklks
avltlkvilg fflpfvvmac cytiiihtli qakksskhka
lkvtitvltv fvlsqfpync illvqtiday amfisncavs
tnidicfqvt qtiaffhscl npvlyvfvge rfrrdlyktl
knlgcisqaq wvsftrregs lklssmllet tsgalsl
Human CCL25 Isoform 1
(SEQ ID NO: 198)
qgvfedc clayhypigw avlrrawtyr iqevsgscnl
paaifylpkr hrkvcgnpks revqramkll darnkvfakl
hhntqtfqag phavkklssg nsklssskfs npissskrnv
sllisansgl
Human CCL25 Isoform 2
(SEQ ID NO: 199)
qgvfedc clayhypigw avlrrawtyr iqevsgscnl
paaifylpkr hrkvcgnpks revqramkll darnkvfakl
hhntqtfqgp havkklssgn sklssskfsn pissskrnvs
llisansgl

### CCR9 Inhibitors—Antibodies

[0909] In some embodiments, the CCR9 inhibitor is an antibody or an antigen-binding fragment thereof (e.g., a Fab or a scFv). In some embodiments, an antibody or antigen-binding fragment described herein binds specifically to CCR9. In some embodiments, an antibody or antigen-binding fragment described herein binds specifically to CCL25. In some embodiments, an antibody or antigen-binding fragment described herein binds specifically to both CCR9 and CCL25.

[0910] In some embodiments, the antibody can be a humanized antibody, a chimeric antibody, a multivalent antibody, or a fragment thereof. In some embodiments, an antibody can be a scFv-Fc (Sokolowska-Wedzina et al., Mol. Cancer Res. 15(8):1040-1050, 2017), a VHH domain (Li et al., Immunol. Lett. 188:89-95, 2017), a VNAR domain (Hasler et al., Mol. Immunol. 75:28-37, 2016), a (scFv)₂, a minibody (Kim et al., PLoS One 10(1):e113442, 2014), or a BiTE. In some embodiments, an antibody can be a DVD-Ig (Wu et al., Nat. Biotechnol. 25(11):1290-1297, 2007; WO 08/024188; and WO 07/024715), and a dual-affinity re-targeting antibody (DART) (Tsai et al., Mol. Ther. Oncolytics 3:15024, 2016), a triomab (Chelius et al., MAbs 2(3):309-319, 2010), kih IgG with a common LC (Kontermann et al., Drug Discovery Today 20(7):838-847, 2015), a crossmab (Regula et al., EMBO Mol. Med. 9(7):985, 2017), an ortho-Fab IgG (Kontermann et al., Drug Discovery Today 20(7):838-847, 2015), a 2-in-1-IgG (Kontermann et al., Drug Discovery Today 20(7):838-847, 2015), IgG-scFv (Cheal et al., Mol. Cancer Ther. 13(7):1803-1812, 2014), scFv2-Fc (Natsume et al., J Biochem. 140(3):359-368, 2006), a bi-nanobody (Kontermann et al., Drug Discovery Today 20(7):838-847, 2015), tanden antibody (Kontermann et al., Drug Discovery Today 20(7):838-847, 2015), a DART-Fc (Kontermann et al., Drug Discovery Today 20(7):838-847, 2015), a scFv-HSA-scFv (Kontermann et al., Drug Discovery Today 20(7):838-847, 2015), DNL-Fab3 (Kontermann et al., Drug Discovery Today 20(7):838-847, 2015), DAF (two-in-one or four-in-one), DutaMab, DT-IgG, knobs-in-holes common LC, knobs-in-holes assembly, charge pair antibody, Fab-arm exchange antibody, SEEDbody, Triomab, LUZ-Y, Fcab, kλ-body, orthogonal Fab, DVD-IgG, IgG(H)-scFv, scFv-(H)IgG, IgG(L)-scFv, scFv-(L)-IgG, IgG (L,H)-Fc, IgG(H)-V, V(H)—IgG, IgG(L)-V, V(L)-IgG, KIH IgG-scFab, 2scFv-IgG, IgG-2scFv, scFv4-Ig, Zybody, DVI-IgG, nanobody (e.g., antibodies derived from Camelus bactriamus, Calelus dromaderius, or Lama paccos) (U.S. Pat. No. 5,759,808; Stijlemans et al., J. Biol. Chem. 279:1256-1261, 2004; Dumoulin et al., Nature 424:783-788, 2003; and Pleschberger et al., Bioconjugate Chem. 14:440-448, 2003), nanobody-HSA, a diabody (e.g., Poljak, Structure 2(12):1121-1123, 1994; and Hudson et al., J. Immunol. Methods 23(1-2):177-189, 1999), a TandAb (Reusch et al., mAbs 6(3):727-738, 2014), scDiabody (Cuesta et al., Trends in Biotechnol. 28(7):355-362, 2010), scDiabody-CH3 (Sanz et al., Trends in Immunol. 25(2):85-91, 2004), Diabody-CH3, Triple Body, miniantibody, minibody, TriBi minibody, scFv-CH3 KIH, Fab-scFv, scFv-CH-CL-scFv, F(ab′)2-scFV2, scFv-KIH, Fab-scFv-Fc, tetravalent HCAb, scDiabody-Fc, diabody-Fc, tandem scFv-Fc, intrabody (Huston et al., Human Antibodies 10(3-4):127-142, 2001; Wheeler et al., Mol. Ther 8(3):355-366, 2003; and Stocks, Drug Discov. Today 9(22):960-966, 2004), dock and lock bispecific antibody, ImmTAC, HSAbody, scDiabody-HSA, tandem scFv, IgG-IgG, Cov-X-Body, and scFv1-PEG-scFv2.

[0911] Non-limiting examples of an antigen-binding fragment of an antibody include an Fv fragment, a Fab fragment, a F(ab′)₂ fragment, and a Fab′ fragment. Additional examples of an antigen-binding fragment of an antibody is an antigen-binding fragment of an IgG (e.g., an antigen-binding fragment of IgG1, IgG2, IgG3, or IgG4) (e.g., an antigen-binding fragment of a human or humanized IgG, e.g., human or humanized IgG1, IgG2, IgG3, or IgG4); an antigen-binding fragment of an IgA (e.g., an antigen-binding fragment of IgA1 or IgA2) (e.g., an antigen-binding fragment of a human or humanized IgA, e.g., a human or humanized IgA1 or IgA2); an antigen-binding fragment of an IgD (e.g., an antigen-binding fragment of a human or humanized IgD); an antigen-binding fragment of an IgE (e.g., an antigen-binding fragment of a human or humanized IgE); or an antigen-binding fragment of an IgM (e.g., an antigen-binding fragment of a human or humanized IgM).

[0912] In some embodiments, an antibody can be an IgNAR, a bispecific antibody (Milstein and Cuello, Nature 305:537-539, 1983; Suresh et al., Methods in Enzymology 121:210, 1986; WO 96/27011; Brennan et al., Science 229:81, 1985; Shalaby et al., J. Exp. Med. 175:217-225, 1992; Kolstelny et al., J. Immunol. 148(5):1547-1553, 1992; Hollinger et al., Proc. Nat. Acad. Sci. U.S.A. 90:6444-6448, 1993; Gruber et al., J. Immunol. 152:5368, 1994; and Tutt et al., J. Immunol. 147:60, 1991), a bispecific diabody, a triabody (Schoonooghe et al., BMC Biotechnol. 9:70, 2009), a tetrabody, scFv-Fc knobs-into-holes, a scFv-Fc-scFv, a (Fab′scFv)₂, a V-IgG, a IvG-V, a dual V domain IgG, a heavy chain immunoglobulin or a camelid (Holt et al., Trends Biotechnol. 21(11):484-490, 2003), an intrabody, a monoclonal antibody (e.g., a human or humanized monoclonal antibody), a heteroconjugate antibody (e.g., U.S. Pat. No. 4,676,980), a linear antibody (Zapata et al., Protein Eng. 8(10:1057-1062, 1995), a trispecific antibody (Tutt et al., J. Immunol. 147:60, 1991), a Fabs-in-Tandem immunoglobulin (WO 15/103072), or a humanized camelid antibody.

[0913] In other instances, the CCR9 inhibitor is a monoclonal antibody. For example, the CCR9 antibody can be 91R, see, e.g., Chamorro et al., MAbs 6(4): 1000-1012, 2014. Additional non-limiting examples of CCR9 inhibitors are described in, e.g., U.S. Patent Application Publication Nos. 2012/0100554, 2012/0100154, 2011/0123603, 2009/0028866, and 2005/0181501.

[0914] In some embodiments, any of the antibodies or antigen-binding fragments described herein has a dissociation constant (K_{D}) of less than 1×10⁻⁵ M (e.g., less than 0.5×10⁻⁵ M, less than 1×10⁻⁶ M, less than 0.5×10⁻⁶ M, less than 1×10⁻⁷ M, less than 0.5×10⁻⁷ M, less than 1×10⁻⁸ M, less than 0.5×10⁻⁸ M, less than 1×10⁻⁹ M, less than 0.5×10⁻⁹ M, less than 1×10⁻¹⁰ M, less than 0.5×10⁻¹⁰ M, less than 1×10⁻¹¹ M, less than 0.5×10⁻¹¹ M, or less than 1×10⁻¹² M), e.g., as measured in phosphate buffered saline using surface plasmon resonance (SPR).

[0915] In some embodiments, any of the antibodies or antigen-binding fragments described herein has a K_{D} of about 1×10⁻¹² M to about 1×10⁻⁵ M, about 0.5×10⁻⁵ M, about 1×10⁻⁶ M, about 0.5×10⁻⁶ M, about 1×10⁻⁷ M, about 0.5×10⁻⁷ M, about 1×10⁻⁸ M, about 0.5×10 8 M, about 1×10⁻⁹ M, about 0.5×10⁻⁹ M, about 1×10⁻¹⁰ M, about 0.5×10⁻¹⁰ M, about 1×10⁻¹¹ M, or about 0.5×10⁻¹¹ M (inclusive); about 0.5×10⁻¹¹ M to about 1×10⁻⁵ M, about 0.5×10⁻⁵ M, about 1×10⁻⁶ M, about 0.5×10⁻⁶ M, about 1×10⁻⁷ M, about 0.5×10⁻⁷ M, about 1×10⁻⁸ M, about 0.5×10⁻⁸ M, about 1×10⁻⁹ M, about 0.5×10⁻⁹ M, about 1×10⁻¹⁰ M, about 0.5×10⁻¹⁰ M, or about 1×10⁻¹¹ M (inclusive); about 1×10⁻¹¹ M to about 1×10⁻⁵ M, about 0.5×10⁻⁵ M, about 1×10⁻⁶ M, about 0.5×10⁻⁶ M, about 1×10⁻⁷ M, about 0.5×10⁻⁷ M, about 1×10⁻⁸ M, about 0.5×10⁻⁸ M, about 1×10⁻⁹ M, about 0.5×10⁻⁹ M, about 1×10⁻¹⁰ M, or about 0.5×10⁻¹⁰ M (inclusive); about 0.5×10⁻¹⁰ M to about 1×10⁻⁵ M, about 0.5×10⁻⁵ M, about 1×10⁻⁶ M, about 0.5×10⁻⁶ M, about 1×10⁻⁷ M, about 0.5×10⁻⁷ M, about 1×10⁻⁸ M, about 0.5×10⁻⁸ M, about 1×10⁻⁹ M, about 0.5×10⁻⁹ M, or about 1×10⁻¹⁰ M (inclusive); about 1×10⁻¹⁰ M to about 1×10⁻⁵ M, about 0.5×10⁻⁵ M, about 1×10⁻⁶ M, about 0.5×10⁻⁶ M, about 1×10⁻⁷ M, about 0.5×10⁻⁷ M, about 1×10⁻⁸ M, about 0.5×10⁻⁸ M, about 1×10⁻⁹ M, or about 0.5×10⁻⁹ M (inclusive); about 0.5×10⁻⁹ M to about 1×10⁻⁵ M, about 0.5×10⁻⁵ M, about 1×10⁻⁶ M, about 0.5×10⁻⁶ M, about 1×10⁻⁷ M, about 0.5×10⁻⁷ M, about 1×10-M, about 0.5×10⁻⁸ M, or about 1×10⁻⁹ M (inclusive); about 1×10⁻⁹ M to about 1×10⁻⁵ M, about 0.5×10⁻⁵ M, about 1×10⁻⁶ M, about 0.5×10⁻⁶ M, about 1×10⁻⁷ M, about 0.5×10⁻⁷ M, about 1×10⁻⁸ M, or about 0.5×10⁻⁸ M (inclusive); about 0.5×10⁻⁸ M to about 1×10⁻⁵ M, about 0.5×10⁻⁵ M, about 1×10⁻⁶ M, about 0.5×10⁻⁶ M, about 1×10⁻⁷ M, about 0.5×10⁻⁷ M, or about 1×10⁻⁸ M (inclusive); about 1×10⁻⁸ M to about 1×10⁻⁵ M, about 0.5×10⁻⁵ M, about 1×10⁻⁶ M, about 0.5×10⁻⁶ M, about 1×10⁻⁷ M, or about 0.5×10⁻⁷ M (inclusive); about 0.5×10⁻⁷ M to about 1×10⁻⁵ M, about 0.5×10⁻⁵ M, about 1×10⁻⁶ M, about 0.5×10⁻⁶ M, or about 1×10⁻⁷ M (inclusive); about 1×10⁻⁷ M to about 1×10⁻⁵ M, about 0.5×10⁻⁵ M, about 1×10⁻⁶ M, or about 0.5×10⁻⁶ M (inclusive); about 0.5×10⁻⁶ M to about 1×10⁻⁵ M, about 0.5×10⁻⁵ M, or about 1×10⁻⁶ M (inclusive); about 1×10⁻⁶ M to about 1×10⁻⁵ M or about 0.5×10⁻⁵ M (inclusive); or about 0.5×10⁻⁵ M to about 1×10⁻⁵ M (inclusive), e.g., as measured in phosphate buffered saline using surface plasmon resonance (SPR).

[0916] In some embodiments, any of the antibodies or antigen-binding fragments described herein has a K_{off} of about 1×10⁻⁶ s⁻¹ to about 1×10⁻³ s⁻¹, about 0.5×10⁻³ s⁻¹, about 1×10⁻⁴ s⁻¹, about 0.5×10⁻⁴ s⁻¹, about 1×10⁻⁵ s⁻¹, or about 0.5×10⁻⁵ s⁻¹ (inclusive); about 0.5×10⁻⁵ s⁻¹ to about 1×10⁻³ s⁻¹, about 0.5×10⁻³ s⁻¹, about 1×10⁻⁴ s⁻¹, about 0.5×10⁻⁴ s⁻¹, or about 1×10⁻⁵ s⁻¹ (inclusive); about 1×10⁻⁵ s⁻¹ to about 1×10⁻³ s⁻¹, about 0.5×10⁻³ s⁻¹, about 1×10⁻⁴ s⁻¹, or about 0.5×10⁻⁴ s⁻¹ (inclusive); about 0.5×10⁻⁴ s⁻¹ to about 1×10⁻³ s⁻¹, about 0.5×10⁻³ s⁻¹, or about 1×10⁻⁴ s⁻¹ (inclusive); about 1×10⁻⁴ s⁻¹ to about 1×10⁻³ s⁻¹, or about 0.5×10⁻³ s⁻¹ (inclusive); or about 0.5×10⁻⁵ s⁻¹ to about 1×10⁻³ s⁻¹ (inclusive), e.g., as measured in phosphate buffered saline using surface plasmon resonance (SPR).

[0917] In some embodiments, any of the antibodies or antigen-binding fragments described herein has a Kₒₙ of about 1×10² M⁻¹s⁻¹ to about 1×10⁶ M⁻¹s⁻¹, about 0.5×10⁶ M⁻¹s⁻¹, about 1×10⁵ M⁻¹s⁻¹, about 0.5×10⁵ M⁻¹s⁻¹, about 1×10⁴ M⁻¹s⁻¹, about 0.5×10⁴ M⁻¹s⁻¹, about 1×10³ M⁻¹s⁻¹, or about 0.5×10³ M⁻¹s⁻¹ (inclusive); about 0.5×10³ M⁻¹s⁻¹ to about 1×10⁶ M⁻¹s⁻¹, about 0.5×10⁶ M⁻¹s⁻¹, about 1×10⁵ M⁻¹s⁻¹, about 0.5×10⁵ M⁻¹s⁻¹, about 1×10⁴ M⁻¹s⁻¹, about 0.5×10⁴ M⁻¹s⁻¹, or about 1×10³ M⁻¹s⁻¹ (inclusive); about 1×10³ M⁻¹s⁻¹ to about 1×10⁶ M⁻¹s⁻¹, about 0.5×10⁶ M⁻¹s⁻¹, about 1×10⁵ M⁻¹s⁻¹, about 0.5×10⁵ M⁻¹s⁻¹, about 1×10⁴ M⁻¹s⁻¹, or about 0.5×10⁴ M⁻¹s⁻¹ (inclusive); about 0.5×10⁴ M⁻¹s⁻¹ to about 1×10⁶ M⁻¹s⁻¹, about 0.5×10⁶ M⁻¹s⁻¹, about 1×10⁵ M⁻¹s⁻¹, about 0.5×10⁵ M⁻¹s⁻¹, or about 1×10⁴ M⁻¹s⁻¹ (inclusive); about 1×10⁴ M⁻¹s⁻¹ to about 1×10⁶ M⁻¹s⁻¹, about 0.5×10⁶ M⁻¹s⁻¹, about 1×10⁵ M⁻¹s⁻¹, or about 0.5×10⁵ M⁻¹s⁻¹ (inclusive); about 0.5×10⁵ M⁻¹s⁻¹ to about 1×10⁶ M⁻¹s⁻¹, about 0.5×10⁶ M⁻¹s⁻¹, or about 1×10⁵ M⁻¹s⁻¹ (inclusive); about 1×10⁵ M⁻¹s⁻¹ to about 1×10⁶ M⁻¹s⁻¹, or about 0.5×10⁶ M⁻¹s⁻¹ (inclusive); or about 0.5×10⁶ M⁻¹s⁻¹ to about 1×10⁶ M⁻¹s⁻¹ (inclusive), e.g., as measured in phosphate buffered saline using surface plasmon resonance (SPR).

[0918] Additional examples of CCR9 inhibitors that are antibodies or antigen-binding antibody fragments are known in the art.

### CCR9 Inhibitors—Small Molecules

[0919] In some instances, the CCR9 inhibitor is a small molecule. For example, the CCR9 inhibitor can be Traficet-EN® (also called Vercirnon, CCX282, and GSK1605786) or Tu1652 CCX507. See, e.g., Eksteen et al., IDrugs 13(7):472-481, 2010; and Walters et al., Gastroenterology 144(5):S-815, 2013.

[0920] Additional examples of CCR9 inhibitors that are small molecules are known in the art.

### ELR Chemokine Inhibitors

[0921] ELR chemokines are CXC chemokines that have a glutamic acid-leucine-arginine (ELR) motif. See, e.g., Strieter et al., J Biol. Chem. 270:27348-27357, 1995.

[0922] The term “ELR chemokine inhibitor” refers to an agent which decreases the ability of CXCR1 and/or CXCR2 to bind to one or more (e.g., two, three, four, five, six, seven, or eight) of CXCL1, CXCL2, CXCL3, CXCL4, CXCL5, CXCL6, CXCL7, and CXCL8.

[0923] In some embodiments, the ELR chemokine inhibitor can decrease the binding between CXCR1 and CXCL8 by blocking the ability of CXCR1 to interact with CXCL8. In some embodiments, the ELR chemokine inhibitor can decrease the binding between CXCR1 and CXCL6 by blocking the ability of CXCR1 to interact with CXCL6. In some embodiments, the ELR chemokine inhibitor can decrease the binding between CXCR1 and each of CXCL8 and CXCL6.

[0924] In some embodiments, the ELR chemokine inhibitor can decrease the binding between CXCR2 and CXCL1 by blocking the ability of CXCR2 to interact with CXCL1. In some embodiments, the ELR chemokine inhibitor can decrease the binding between CXCR2 and CXCL2 by blocking the ability of CXCR2 to interact with CXCL2. In some embodiments, the ELR chemokine inhibitor can decrease the binding between CXCR2 and CXCL3 by blocking the ability of CXCR2 to interact with CXCL3. In some embodiments, the ELR chemokine inhibitor can decrease the binding between CXCR2 and CXCL4 by blocking the ability of CXCR2 to interact with CXCL4. In some embodiments, the ELR chemokine inhibitor can decrease the binding between CXCR2 and CXCL5 by blocking the ability of CXCR2 to interact with CXCL5. In some embodiments, the ELR chemokine inhibitor can decrease the binding between CXCR2 and CXCL6 by blocking the ability of CXCR2 to interact with CXCL6. In some embodiments, the ELR chemokine inhibitor can decrease the binding between CXCR2 and CXCL7 by blocking the ability of CXCR2 to interact with CXCL7. In some embodiments, the ELR chemokine inhibitor can decrease the binding between CXCR2 and one or more (e.g., two, three, four, five, six, or seven) of CXCL1, CXCL2, CXCL3, CXCL4, CXCL5, CXCL6, and CXCL7.

[0925] In some embodiments, the ELR chemokine inhibitor can decrease the binding of CXCR1 to one or both of CXCL6 and CXCL8, and can decrease the binding to CXCR2 to one or more (e.g., two, three, four, five, six, or seven) of CXCL1, CXCL2, CXCL3, CXCL4, CXCL5, CXCL6, and CXCL7

[0926] In some instances, the ELR chemokine inhibitor is a small molecule. In some instances, the ELR chemokine inhibitor is an antibody or an antigen-binding antibody fragment.

[0927] Exemplary sequences for human CXCR1, human CXCR2, human CXCL1, human CXCL2, human CXCL3, human CXCL4, human CXCL5, human CXCL6, human CXCL7, and human CXCL8.

Human CXCR1
(SEQ ID NO: 200)
msnitdpqmw dfddlnftgm ppadedyspc xletetlnky
vviiayalvf llsllgnslv mlvilysrvg rsvtdvylln
laladllfal tlpiwaaskv ngwifgtflc kvvsllkevn
fysgilllac isvdrylaiv hatrtltqkr hlvkfvclgc
wglsmnlslp fflfrqayhp nnsspvcyev lgndtakwrm
vlrilphtfg fivplfvmlf cygftlrtlf kahmgqkhra
mrvifavvli fllcwlpynl vlladtlmrt qviqescerr
nnigraldat eilgflhscl npiiyafigq nfrhgflkil
amhglvskef larhrvtsyt sssvnvssnl
Human CXCR2
(SEQ ID NO: 201)
medfnmesds fedfwkgedl snysysstlp pflldaapce
pesleinkyf vviiyalvfl lsllgnslvm lvilysrvgr
svtdvyllnl aladllfalt lpiwaaskvn gwifgtflck
vvsllkevnf ysgilllaci svdrylaivh atrtltqkry
lvkficlsiw glslllalpv llfrrtvyss nvspacyedm
gnntanwrml lrilpqsfgf ivpllimlfc ygftlrtlfk
ahmgqkhram rvifavvlif llcwlpynlv lladtlmrtq
viqetcerrn hidraldate ilgilhscln pliyafigqk
frhgllkila ihgliskdsl pkdsrpsfvg sssghtsttl
Human CXCL1
(SEQ ID NO: 202)
maraalsaap snprllrval lllllvaagr raagasvate
lrcqclqtlq gihpkniqsv nvkspgphca qteviatlkn
grkaclnpas pivkkiiekm lnsdksn
Human CXCL2
(SEQ ID NO: 203)
maratlsaap snprllrval lllllvaasr raagaplate
lrcqclqtlq gihlkniqsv kvkspgphca qteviatlkn
gqkaclnpas pmvkkiiekm lkngksn
Human CXCL3
(SEQ ID NO: 204)
asvvte lrcqclqtlq gihlkniqsv nvrspgphca
qteviatlkn gkkaclnpas pmvqkiieki lnkgstn
Human CXCL4
(SEQ ID NO: 205)
mssaagfcas rpgllflgll llplvvafas aeaeedgdlq
clcvkttsqv rprhitslev ikagphcpta qliatlkngr
kicldlqapl ykkiikklle s
Human CXCL5
(SEQ ID NO: 206)
msllssraar vpgpssslca llvllllltq pgpiasagpa
aavlrelrcv clqttqgvhp kmisnlqvfa igpqcskvev
vaslkngkei cldpeapflk kviqkildgg nken
Human CXCL6
(SEQ ID NO: 207)
gpv savltelrct clrvtlrvnp ktigklqvfp agpqcskvev
vaslkngkqv cldpeapflk kviqkildsg nkkn
Human CXCL7
(SEQ ID NO: 208)
mslrldttps cnsarplhal qvllllslll talasstkgq
tkrnlakgke esldsdlyae lrcmciktts gihpkniqsl
evigkgthcn qveviatlkd grkicldpda prikkivqkk
lagdesad
Human CXCL8 Isoform 1
(SEQ ID NO: 209)
egavlprsak elrcqcikty skpfhpkfik elrviesgph
canteiivkl sdgrelcldp kenwvqrvve kflkraens
Human CXCL8 Isoform 2
(SEQ ID NO: 210)
egavlprsak elrcqcikty skpfhpkfik elrviesgph
canteiivkl sdgrelcldp kenwvqrvve kflkr

### ELR Chemokine Inhibitors—Antibodies

[0928] In some embodiments, the ELR chemokine inhibitor is an antibody or an antigen-binding fragment thereof (e.g., a Fab or a scFv). In some embodiments, an antibody or antigen-binding fragment described herein binds specifically to CXCR1 and/or CXCR2. In some embodiments, an antibody or antigen-binding fragment described herein binds specifically to one or more (e.g., two, three, four, five, six, seven, or eight) of: CXCL1, CXCL2, CXCL3, CXCL4, CXCL5, CXCL6, CXCL7, and CXCL8 (IL-8).

[0929] In some embodiments, the antibody can be a humanized antibody, a chimeric antibody, a multivalent antibody, or a fragment thereof. In some embodiments, an antibody can be a scFv-Fc (Sokolowska-Wedzina et al., Mol. Cancer Res. 15(8):1040-1050, 2017), a VHH domain (Li et al., Immunol. Lett. 188:89-95, 2017), a VNAR domain (Hasler et al., Mol. Immunol. 75:28-37, 2016), a (scFv)₂, a minibody (Kim et al., PLoS One 10(1):e113442, 2014), or a BiTE. In some embodiments, an antibody can be a DVD-Ig (Wu et al., Nat. Biotechnol. 25(11):1290-1297, 2007; WO 08/024188; and WO 07/024715), and a dual-affinity re-targeting antibody (DART) (Tsai et al., Mol. Ther. Oncolytics 3:15024, 2016), a triomab (Chelius et al., MAbs 2(3):309-319, 2010), kih IgG with a common LC (Kontermann et al., Drug Discovery Today 20(7):838-847, 2015), a crossmab (Regula et al., EMBO Mol. Med. 9(7):985, 2017), an ortho-Fab IgG (Kontermann et al., Drug Discovery Today 20(7):838-847, 2015), a 2-in-1-IgG (Kontermann et al., Drug Discovery Today 20(7):838-847, 2015), IgG-scFv (Cheal et al., Mol. Cancer Ther. 13(7):1803-1812, 2014), scFv2-Fc (Natsume et al., J. Biochem. 140(3):359-368, 2006), a bi-nanobody (Kontermann et al., Drug Discovery Today 20(7):838-847, 2015), tanden antibody (Kontermann et al., Drug Discovery Today 20(7):838-847, 2015), a DART-Fc (Kontermann et al., Drug Discovery Today 20(7):838-847, 2015), a scFv-HSA-scFv (Kontermann et al., Drug Discovery Today 20(7):838-847, 2015), DNL-Fab3 (Kontermann et al., Drug Discovery Today 20(7):838-847, 2015), DAF (two-in-one or four-in-one), DutaMab, DT-IgG, knobs-in-holes common LC, knobs-in-holes assembly, charge pair antibody, Fab-arm exchange antibody, SEEDbody, Triomab, LUZ-Y, Fcab, kλ-body, orthogonal Fab, DVD-IgG, IgG(H)-scFv, scFv-(H)IgG, IgG(L)-scFv, scFv-(L)-IgG, IgG (L,H)-Fc, IgG(H)-V, V(H)—IgG, IgG(L)-V, V(L)-IgG, KIH IgG-scFab, 2scFv-IgG, IgG-2scFv, scFv4-Ig, Zybody, DVI-IgG, nanobody (e.g., antibodies derived from Camelus bactriamus, Calelus dromaderius, or Lama paccos) (U.S. Pat. No. 5,759,808; Stijlemans et al., J. Biol. Chem. 279:1256-1261, 2004; Dumoulin et al., Nature 424:783-788, 2003; and Pleschberger et al., Bioconjugate Chem. 14:440-448, 2003), nanobody-HSA, a diabody (e.g., Poljak, Structure 2(12):1121-1123, 1994; and Hudson et al., J. Immunol. Methods 23(1-2):177-189, 1999), a TandAb (Reusch et al., mAbs 6(3):727-738, 2014), scDiabody (Cuesta et al., Trends in Biotechnol. 28(7):355-362, 2010), scDiabody-CH3 (Sanz et al., Trends in Immunol. 25(2):85-91, 2004), Diabody-CH3, Triple Body, miniantibody, minibody, TriBi minibody, scFv-CH3 KIH, Fab-scFv, scFv-CH-CL-scFv, F(ab′)2-scFV2, scFv-KIH, Fab-scFv-Fc, tetravalent HCAb, scDiabody-Fc, diabody-Fc, tandem scFv-Fc, intrabody (Huston et al., Human Antibodies 10(3-4):127-142, 2001; Wheeler et al., Mol. Ther 8(3):355-366, 2003; and Stocks, Drug Discov. Today 9(22):960-966, 2004), dock and lock bispecific antibody, ImmTAC, HSAbody, scDiabody-HSA, tandem scFv, IgG-IgG, Cov-X-Body, and scFv1-PEG-scFv2.

[0930] Non-limiting examples of an antigen-binding fragment of an antibody include an Fv fragment, a Fab fragment, a F(ab′)₂ fragment, and a Fab′ fragment. Additional examples of an antigen-binding fragment of an antibody is an antigen-binding fragment of an IgG (e.g., an antigen-binding fragment of IgG1, IgG2, IgG3, or IgG4) (e.g., an antigen-binding fragment of a human or humanized IgG, e.g., human or humanized IgG1, IgG2, IgG3, or IgG4); an antigen-binding fragment of an IgA (e.g., an antigen-binding fragment of IgA1 or IgA2) (e.g., an antigen-binding fragment of a human or humanized IgA, e.g., a human or humanized IgA1 or IgA2); an antigen-binding fragment of an IgD (e.g., an antigen-binding fragment of a human or humanized IgD); an antigen-binding fragment of an IgE (e.g., an antigen-binding fragment of a human or humanized IgE); or an antigen-binding fragment of an IgM (e.g., an antigen-binding fragment of a human or humanized IgM).

[0931] In some embodiments, an antibody can be an IgNAR, a bispecific antibody (Milstein and Cuello, Nature 305:537-539, 1983; Suresh et al., Methods in Enzymology 121:210, 1986; WO 96/27011; Brennan et al., Science 229:81, 1985; Shalaby et al., J. Exp. Med. 175:217-225, 1992; Kolstelny et al., J. Immunol. 148(5):1547-1553, 1992; Hollinger et al., Proc. Natl. Acad. Sci. U.S.A. 90:6444-6448, 1993; Gruber et al., J. Immunol. 152:5368, 1994; and Tutt et al., J. Immunol. 147:60, 1991), a bispecific diabody, a triabody (Schoonooghe et al., BMC Biotechnol. 9:70, 2009), a tetrabody, scFv-Fc knobs-into-holes, a scFv-Fc-scFv, a (Fab′scFv)₂, a V-IgG, a IvG-V, a dual V domain IgG, a heavy chain immunoglobulin or a camelid (Holt et al., Trends Biotechnol. 21(11):484-490, 2003), an intrabody, a monoclonal antibody (e.g., a human or humanized monoclonal antibody), a heteroconjugate antibody (e.g., U.S. Pat. No. 4,676,980), a linear antibody (Zapata et al., Protein Eng. 8(10:1057-1062, 1995), a trispecific antibody (Tutt et al., J. Immunol. 147:60, 1991), a Fabs-in-Tandem immunoglobulin (WO 15/103072), or a humanized camelid antibody.

[0932] An ELR chemokine inhibitor can be, e.g., a monoclonal antibody. A non-limiting example of an ELR inhibitor is TAB-099MZ. Additional examples of ELR chemokine inhibitors that are antibodies or antigen-binding antibody fragments are described in, e.g., U.S. Pat. No. 9,290,570; and U.S. Patent Application Publication Nos. 2004/0170628, 2010/0136031, 2015/0160227, 2015/0224190, 2016/0060347, 2016/0152699, 2016/0108117, 2017/0131282, 2016/0060347, 2014/0271647, 2014/0170156, 2012/0164143, 2010/0254941, 2009/0130110, 2008/0118517, 2004/0208873, 2003/0021790, 2002/0082396, and 2001/0006637, each of which is herein incorporated by reference (e.g., the portions describing ELR chemokine inhibitors).

[0933] In some embodiments, any of the antibodies or antigen-binding fragments described herein has a dissociation constant (K_{D}) of less than 1×10⁻⁵ M (e.g., less than 0.5×10⁻⁵ M, less than 1×10⁻⁶ M, less than 0.5×10⁻⁶ M, less than 1×10⁻⁷ M, less than 0.5×10⁻⁷ M, less than 1×10⁻⁸ M, less than 0.5×10⁻⁸ M, less than 1×10⁻⁹ M, less than 0.5×10⁻⁹ M, less than 1×10⁻¹⁰ M, less than 0.5×10⁻¹⁰ M, less than 1×10⁻¹¹ M, less than 0.5×10⁻¹¹ M, or less than 1×10⁻¹² M), e.g., as measured in phosphate buffered saline using surface plasmon resonance (SPR).

[0934] In some embodiments, any of the antibodies or antigen-binding fragments described herein has a K_{D} of about 1×10⁻¹² M to about 1×10⁻⁵ M, about 0.5×10⁻⁵ M, about 1×10⁻⁶ M, about 0.5×10⁻⁶ M, about 1×10⁻⁷ M, about 0.5×10⁻⁷ M, about 1×10⁻⁸ M, about 0.5×10 8 M, about 1×10⁻⁹ M, about 0.5×10⁻⁹ M, about 1×10⁻¹⁰ M, about 0.5×10⁻¹⁰ M, about 1×10⁻¹¹ M, or about 0.5×10⁻¹¹ M (inclusive); about 0.5×10⁻¹¹ M to about 1×10⁻⁵ M, about 0.5×10⁻⁵ M, about 1×10⁻⁶ M, about 0.5×10⁻⁶ M, about 1×10⁻⁷ M, about 0.5×10⁻⁷ M, about 1×10⁻⁸ M, about 0.5×10⁻⁸ M, about 1×10⁻⁹ M, about 0.5×10⁻⁹ M, about 1×10⁻¹⁰ M, about 0.5×10⁻¹⁰ M, or about 1×10⁻¹¹ M (inclusive); about 1×10⁻¹¹ M to about 1×10⁻⁵ M, about 0.5×10⁻⁵ M, about 1×10⁻⁶ M, about 0.5×10⁻⁶ M, about 1×10⁻⁷ M, about 0.5×10⁻⁷ M, about 1×10⁻⁸ M, about 0.5×10⁻⁸ M, about 1×10⁻⁹ M, about 0.5×10⁻⁹ M, about 1×10⁻¹⁰ M, or about 0.5×10⁻¹⁰ M (inclusive); about 0.5×10⁻¹⁰ M to about 1×10⁻⁵ M, about 0.5×10⁻⁵ M, about 1×10⁻⁶ M, about 0.5×10⁻⁶ M, about 1×10⁻⁷ M, about 0.5×10⁻⁷ M, about 1×10⁻⁸ M, about 0.5×10⁻⁸ M, about 1×10⁻⁹ M, about 0.5×10⁻⁹ M, or about 1×10⁻¹⁰ M (inclusive); about 1×10⁻¹⁰ M to about 1×10⁻⁵ M, about 0.5×10⁻⁵ M, about 1×10⁻⁶ M, about 0.5×10⁻⁶ M, about 1×10⁻⁷ M, about 0.5×10⁻⁷ M, about 1×10⁻⁸ M, about 0.5×10⁻⁸ M, about 1×10⁻⁹ M, or about 0.5×10⁻⁹ M (inclusive); about 0.5×10⁻⁹ M to about 1×10⁻⁵ M, about 0.5×10⁻⁵ M, about 1×10⁻⁶ M, about 0.5×10⁻⁶ M, about 1×10⁻⁷ M, about 0.5×10⁻⁷ M, about 1×10⁻⁸ M, about 0.5×10⁻⁸ M, or about 1×10⁻⁹ M (inclusive); about 1×10⁻⁹ M to about 1×10⁻⁵ M, about 0.5×10⁻⁵ M, about 1×10⁻⁶ M, about 0.5×10⁻⁶ M, about 1×10⁻⁷ M, about 0.5×10⁻⁷ M, about 1×10⁻⁸ M, or about 0.5×10⁻⁸ M (inclusive); about 0.5×10⁻⁸ M to about 1×10⁻⁵ M, about 0.5×10⁻⁵ M, about 1×10⁻⁶ M, about 0.5×10⁻⁶ M, about 1×10⁻⁷ M, about 0.5×10⁻⁷ M, or about 1×10⁻⁸ M (inclusive); about 1×10⁻⁸ M to about 1×10⁻⁵ M, about 0.5×10⁻⁵ M, about 1×10⁻⁶ M, about 0.5×10⁻⁶ M, about 1×10⁻⁷ M, or about 0.5×10⁻⁷ M (inclusive); about 0.5×10⁻⁷ M to about 1×10⁻⁵ M, about 0.5×10⁻⁵ M, about 1×10⁻⁶ M, about 0.5×10⁻⁶ M, or about 1×10⁻⁷ M (inclusive); about 1×10⁻⁷ M to about 1×10⁻⁵ M, about 0.5×10⁻⁵ M, about 1×10⁻⁶ M, or about 0.5×10⁻⁶ M (inclusive); about 0.5×10⁻⁶ M to about 1×10⁻⁵ M, about 0.5×10⁻⁵ M, or about 1×10⁻⁶ M (inclusive); about 1×10⁻⁶ M to about 1×10⁻⁵ M or about 0.5×10⁻⁵ M (inclusive); or about 0.5×10⁻⁵ M to about 1×10⁻⁵ M (inclusive), e.g., as measured in phosphate buffered saline using surface plasmon resonance (SPR).

[0935] In some embodiments, any of the antibodies or antigen-binding fragments described herein has a K_{off} of about 1×10⁻⁶ s⁻¹ to about 1×10⁻³ s⁻¹, about 0.5×10⁻³ s⁻¹, about 1×10⁻⁴ s⁻¹, about 0.5×10⁻⁴ s⁻¹, about 1×10⁻⁵ s⁻¹, or about 0.5×10⁻⁵ s⁻¹ (inclusive); about 0.5×10⁻⁵ s⁻¹ to about 1×10⁻³ s⁻¹, about 0.5×10⁻³ s⁻¹, about 1×10⁻⁴ s⁻¹, about 0.5×10⁻⁴ s⁻¹, or about 1×10⁻⁵ s⁻¹ (inclusive); about 1×10⁻⁵ s⁻¹ to about 1×10⁻³ s⁻¹, about 0.5×10⁻³ s⁻¹, about 1×10⁻⁴ s⁻¹, or about 0.5×10⁻⁴ s⁻¹ (inclusive); about 0.5×10⁻⁴ s⁻¹ to about 1×10⁻³ s⁻¹, about 0.5×10⁻³ s⁻¹, or about 1×10⁻⁴ s⁻¹ (inclusive); about 1×10⁻⁴ s⁻¹ to about 1×10⁻³ s⁻¹, or about 0.5×10⁻³ s⁻¹ (inclusive); or about 0.5×10⁻⁵ s⁻¹ to about 1×10⁻³ s⁻¹ (inclusive), e.g., as measured in phosphate buffered saline using surface plasmon resonance (SPR).

[0936] In some embodiments, any of the antibodies or antigen-binding fragments described herein has a Kₒₙ of about 1×10² M⁻¹s⁻¹ to about 1×10⁶ M⁻¹s⁻¹, about 0.5×10⁶ M⁻¹s⁻¹, about 1×10⁵ M⁻¹s⁻¹, about 0.5×10⁵ M⁻¹s⁻¹, about 1×10⁴ M⁻¹s⁻¹, about 0.5×10⁴ M⁻¹s⁻¹, about 1×10³ M⁻¹s⁻¹, or about 0.5×10³ M⁻¹s⁻¹ (inclusive); about 0.5×10³ M⁻¹s⁻¹ to about 1×10⁶ M⁻¹s⁻¹, about 0.5×10⁶ M⁻¹s⁻¹, about 1×10⁵ M⁻¹s⁻¹, about 0.5×10⁵ M⁻¹s⁻¹, about 1×10⁴ M⁻¹s⁻¹, about 0.5×10⁴ M⁻¹s⁻¹, or about 1×10³ M⁻¹s⁻¹ (inclusive); about 1×10³ M⁻¹s⁻¹ to about 1×10⁶ M⁻¹s⁻¹, about 0.5×10⁶ M⁻¹s⁻¹, about 1×10⁵ M⁻¹s⁻¹, about 0.5×10⁵ M⁻¹s⁻¹, about 1×10⁴ M⁻¹s⁻¹, or about 0.5×10⁴ M⁻¹s⁻¹ (inclusive); about 0.5×10⁴ M⁻¹s⁻¹ to about 1×10⁶ M⁻¹s⁻¹, about 0.5×10⁶ M⁻¹s⁻¹, about 1×10⁵ M⁻¹s⁻¹, about 0.5×10⁵ M⁻¹s⁻¹, or about 1×10⁴ M⁻¹s⁻¹ (inclusive); about 1×10⁴ M⁻¹s⁻¹ to about 1×10⁶ M⁻¹s⁻¹, about 0.5×10⁶ M⁻¹s⁻¹, about 1×10⁵ M⁻¹s⁻¹, or about 0.5×10⁵ M⁻¹s⁻¹ (inclusive); about 0.5×10⁵ M⁻¹s⁻¹ to about 1×10⁶ M⁻¹s⁻¹, about 0.5×10⁶ M⁻¹s⁻¹, or about 1×10⁵ M⁻¹s⁻¹ (inclusive); about 1×10⁵ M⁻¹s⁻¹ to about 1×10⁶ M⁻¹s⁻¹, or about 0.5×10⁶ M⁻¹s⁻¹ (inclusive); or about 0.5×10⁶ M⁻¹s⁻¹ to about 1×10⁶ M⁻¹s⁻¹ (inclusive), e.g., as measured in phosphate buffered saline using surface plasmon resonance (SPR).

[0937] Additional examples of ELR chemokine inhibitors that are antibodies or antigen-binding antibody fragments are known in the art.

### ELR Chemokine Inhibitors—Small Molecules

[0938] In some instances, the ELR chemokine inhibitor is, e.g., a small molecule. For example, the ELR chemokine inhibitor can be, e.g., LY-3041658 or repertaxin (Reparixin; DF 1681Y). Additional non-limiting examples of ELR chemokine inhibitors that are small molecules are described in, e.g., U.S. Patent Application Publication Nos. 2007/0248594, 2006/0014794, 2004/0063709, 2004/0034229, 2003/0204085, 2003/0097004, 2004/0186142, 2004/0235908, 2006/0025453, 2017/0224679, 2017/0190681, 2017/0144996, and 2017/0128474, each of which are incorporated by reference (e.g., the portions describing the ELR chemokine inhibitors).

[0939] In some embodiments, the ELR chemokine inhibitor is a peptide, e.g., any of the peptides described in U.S. Patent Application Publication Nos. 2009/0270318, 2009/0118469, and 2007/0160574, 2007/0021593, 2003/0077705, and 2007/0181987, each of which is incorporated by reference (e.g., the portions describing the ELR chemokine inhibitors).

[0940] Phosphodiesterase 4 (PDE4) Inhibitors

[0941] The term “PDE4 inhibitor” refers to an agent which decreases PDE4 activity in vitro or in a mammalian cell, e.g., as compared to the level of PDE4 activity in the absence of the agent; and/or decreases the level of a PDE4 protein in a mammalian cell contacted with the agent, e.g., as compared to the same mammalian cell not contacted with the agent. A non-limiting example of PDE4 activity is the degradation of cAMP.

[0942] In some embodiments, a PDE4 inhibitor can be a small molecule (e.g., an organic, an inorganic, or bioinorganic molecule) having a molecule weight of less than 900 Daltons (e.g., less than 500 Daltons). In some embodiments, a PDE4 inhibitor can be an inhibitory nucleic acid.

### Small Molecules

[0943] In some embodiments, a PDE4 inhibitor is a small molecule. Non-limiting examples of small molecules that are PDE4 inhibitors are shown in Table A.

[0944] Table A. Exemplary Small Molecules that are PDE4 Inhibitors

TABLE A
Exemplary Small Molecules that are PDE4 Inhibitors

| | Originator | | Other Drug | |
|---|---|---|---|---|
| Drug Name | Company | Structure | Names | Indications |
| apremilast | Celgene Corp | [chemical structure] | CC-10004; CC-110004; CDC-104; Otezla; apremilast; lead seICID (2), Celgene seICID (COPD), Celgene; | Asthma; Atopic dermatitis; Crohns disease; Inflammatory disease; Rheumatoid arthritis |
| CC-1088 | Celgene Corp | [chemical structure] | CC-1088; Corp CC-5048; CC-801; CDC-801; lead SeICID (1), Celgene | Crohns disease; Inflammatory disease; Myelodysplastic syndrome |
| tetomilast | Otsuka Pharmaceutical Co Ltd | [chemical structure] | OPC-6535; tetomilast | Chronic obstructive pulmonary disease; Crohns disease; Inflammatory bowel disease; Respiratory disease; Ulcerative colitis |
| KF-19514 | Kyowa Hakko Kogyo Co Ltd | [chemical structure] | KF-19514; PDE 4 inhibitors (asthma), Kyowa | Allergic rhinitis; Asthma; Respiratory disease |
| PF-06266047 | Pfizer Inc | | PF-06266047 | Schizophrenia |
| SKF-107806 | SmithKline | | SKF-107806 | Asthma |
| | Beecham plc | | | |
| PDB-093 | Wyeth- Ayerst Pharmaceuticals Inc | [chemical structure] | PDB-093 | Asthma |
| PDE4 inhibitors (inhalant formulation, chronic obstructive pulmonary disease), AstraZeneca | AstraZeneca plc | [chemical structure] | PDE4 inhibitors (inhalant formulation, chronic obstructive pulmonary disease), AstraZeneca | Chronic obstructive pulmonary disease |
| tolafentrine | Takeda GmbH | [chemical structure] | BY-4070; tolafentrine | Asthma |
| TAK-648 | Takeda | | TAK-648 | Diabetic |
| | Pharmaceutical | | | nephropathy; |
| | Co Ltd | | | Non-insulin |
| | | | | dependent |
| | | | | diabetes |
| CH-928 | UCB | | CH-928 | Asthma |
| | Celltech | | | |
| CH-673 | UCB | | CH-673 | Asthma |
| | Celltech | | | |
| CH-422 | UCB | | CH-422 | Asthma |
| | Celltech | | | |
| ABI-4 | Pfizer Inc | [chemical structure] | 18F-PF- 06445974; ABI-4; Fluorine-18-PF- 06445974; PDE4 inhibitor (psychotic disorders), Pfizer/ Northeastern University; PF-06445974- -[18F] | |
| roflumilast N- oxide (inhalant formulation, airway disorders), Incozen | Incozen Therapeutics Pvt Ltd | [chemical structure] | roflumilast N-oxide; roflumilast N-oxide (inhalant formulation, airway disorders), Inconzen | Respiratory disease |
| PDE4 allosteric inhibitors (mild cognitive impairment/ traumatic brain injury), Tetra Discovery | Tetra Discovery Partners LLC | | PDE4 allosteric inhibitors (mild cognitive impairment/ traumatic brain injury), Tetra Discovery | |
| PDE4 inhibitors (inflammatory disorders), Kyorin Pharmaceuticals | Kyorin Pharmaceutical Co Ltd | [chemical structure] | PDE4 inhibitors (inflammatory disorders), Kyorin Pharmaceuticals | Inflammatory disease |
| BYK-321084 | Takeda | | BYK-321084 | Psoriasis |
| | Pharma A/S | | | |
| WAY-127093B | Wyeth- Ayerst Pharmaceuticals Inc | [chemical structure] | WAY-127093B | Asthma |
| NCS-613 | Centre National de la Recherche Scientifique (CNRS) | [chemical structure] | NCS-613 | Cardiac failure |
| SDZ-ISQ-844 | Novartis AG | [chemical structure] | SDZ-ISQ-844 | Asthma |
| dual long-acting beta2- adrenoceptor agonists/PDE4 inhibitors (inhalant, COPD), Gilead | Gilead Sciences Inc | [chemical structure] | GS-5759; dual long-acting beta2-adrenoceptor agonists/PDE4 inhibitors (inhalant, COPD), Gilead | Chronic obstructive pulmonary disease |
| Ro-20-1724 | Roche Holding AG | [chemical structure] | Ro-20-1724 | Asthma; Psoriasis |
| Hemay-005 | Tianjin | | Hemay-005; | |
| | Hemay Bio- | | TNF alpha | |
| | Tech Co Ltd | | and IL-1 | |
| | | | dual antagonist | |
| | | | (inflammation), | |
| | | | Tianjin | |
| | | | Hemay Bio- | |
| | | | Tech/Hainan | |
| | | | Hailing | |
| | | | Chemipharma | |
| | | | Corporation | |
| PDE3/PDE4 inhibitors, Kyorin | Kyorin Holdings Inc | [chemical structure] | KCA-1490; PDE3/PDE4 inhibitors, Kyorin | Respiratory disease |
| phospho- diesterase inhibitors, Syntex | Roche Palo Alto | [chemical structure] | PDE4 inhibitors, Syntex; TVX-2706; nitraquazone; phosphodiesterase inhibitors, Syntex | Inflammatory disease |
| filaminast | Wyeth- Ayerst Pharmaceuticals Inc | [chemical structure] | PDA-641; WAY-PDA-641; filaminast | Asthma; Inflammatory disease |
| LASSBio-596 | LASSBio | [chemical structure] | LASSBio-596; PDE4/PDE5 inhibitor (acute lung injury/ asthma), LASSBio | Asthma |
| ASP-3258 | Astellas Pharma Inc | [chemical structure] | ASP-3258; PDE 4 inhibitor (airway inflammation), Astellas; phosphodiesterase 4 inhibitor (airway inflammation), Astellas | Respiratory tract inflammation |
| TAS-203 | Taiho Pharmaceutical Co Ltd | [chemical structure] | PDE 4 inhibitor (airway inflammation), Taiho; TAS-203; phosphodiesterase 4 inhibitor (airway inflammation), Taiho | Respiratory tract inflammation |
| PDE4 inhibitor (inflammatory disease/ autoimmune disease), Anacor Pharmaceuticals | Anacor Pharmaceuticals Inc | [chemical structure] | AN-3889; AN-5322; AN-6414; AN-6415; PDE4 inhibitor (inflammatory disease/autoimmune disease), Anacor Pharmaceuticals | |
| lotamilast | Eisai Co Ltd | [chemical structure] | E-6005; RVT-501; lotamilast | |
| GPD-1116 | ASKA Pharmaceutical Co Ltd | [chemical structure] | GPD-1116 | Asthma; Chronic obstructive pulmonary disease; Emphysema |
| cipamfylline | SmithKline Beecham plc | [chemical structure] | BRL-61063; HEP-688; cipamfylline | Asthma; Atopic dermatitis |
| Phospho- | Spring Bank | | Phosphodiesterase | Chronic |
| diesterase | Pharmaceuticals | | 3, 4 and 7 | obstructive |
| 3, 4 and 7 | Inc | | inhibitors (oral, | pulmonary |
| inhibitors (oral, | | | COPD), Spring Bank | disease |
| COPD), Spring | | | Pharmaceuticals; | |
| Bank | | | SMNH compounds | |
| Pharmaceuticals | | | (oral, COPD), | |
| | | | Spring Bank | |
| | | | Pharmaceuticals; | |
| | | | (oral, COPD), | |
| | | | Spring Bank | |
| | | | Pharmaceuticals; | |
| | | | nucleotide based | |
| | | | program (oral, | |
| | | | COPD), Spring | |
| | | | Bank | |
| | | | Pharmaceuticals; | |
| | | | small molecule | |
| | | | nucleic acid | |
| | | | hybrids | |
| | | | (oral, COPD), | |
| | | | Spring Bank | |
| | | | Pharmaceuticals | |
| ZL-N-91 | Zhejiang | | ZL-N-91 | Lung |
| | University | | | inflammation |
| PDE 4 inhibitors (inflammation), Almirall | Almirall Prodesfarma SA | [chemical structure] | PDE 4 inhibitors (inflammation), Almirall | Inflammatory disease |
| CDP-840 | UCB Celltech | [chemical structure] | CDP-840 | Asthma |
| GSK-356278 | GlaxoSmith Kline plc | [chemical structure] | 356278; GSK-356278; PDE4 inhibitor (oral, depression/anxiety, GlaxoSmithKline | Anxiety disorder; Depression; Huntingtons chorea |
| cilomilast | SmithKline Beecham plc | [chemical structure] | Ariflo; SB-207499; cilomilast; oral phosphodiesterase 4 inhibitor (asthma/COPD), GSK | Asthma; Chronic obstructive pulmonary disease |
| PDE4 inhibitors (oral, COPD), GlaxoSmithKline | GlaxoSmith Kline plc | [chemical structure] | PDE4 inhibitors (oral, COPD), GlaxoSmithKline | Chronic obstructive pulmonary disease |
| dual PDE4/ L-type calcium channel inhibitors (hypertension), University of South Carolina | University of South Carolina | [chemical structure] | MNP-001; MS-23; MSP-001; dual PDE4/L-type calcium channel inhibitors (hypertension), University of South Carolina | Hypertension |
| PDE-4 inhibitor | Crystal | | PDE-4 inhibitor | Asthma |
| (asthma), | Genomics | | (asthma), | |
| CrystalGenomics | Inc | | CrystalGenomics | |
| PDE 4 inhibitors (dermatitis/ rheumatoid arthritis), Kyowa Hakko Kirin | Kyowa Hakko Kirin Co Ltd | [chemical structure] | K-34; KF-66490; PDE 4 inhibitors (dermatitis/ rheumatoid arthritis), Kyowa Hakko Kirin | Atopic dermatitis; Rheumatoid arthritis |
| cilomilast (ophthalmic disease), Alcon | GlaxoSmith Kline plc | [chemical structure] | AL-38583; cilomilast; cilomilast (ophthalmic disease), Alcon; cilomilast (ophthalmic disease), GSK | Allergic conjunctivitis; Ocular disease; Xerophthalmia |
| OCID-2987 | Orchid | | OCID-2987; | Asthma; |
| | Pharma Ltd | | PDE IV inhibitor | Chronic |
| | | | (inflammation), | obstructive |
| | | | Orchid; PDE4 | pulmonary |
| | | | inhibitor | disease; |
| | | | (inflammation), | Inflammatory |
| | | | Orchid; | disease |
| | | | phosphodiesterase | |
| | | | IV inhibitor | |
| | | | (inflammation), | |
| | | | Orchid | |
| roflumilast (dermatolocrical, psoriasis/atopic dermatitis), Nycomed | Takeda Pharmaceuticals International GmbH | [chemical structure] | roflumilast; roflumilast (dermatological, psoriasis/atopic dermatitis), Nycomed | Atopic dermatitis; Psoriasis |
| PDE 4 inhibitor | Takeda | | PDE 4 inhibitor | Inflammatory |
| (inflammation), | Pharmaceuticals | | (inflammation), | disease |
| Takeda | | | Takeda | |
| Pharmaceuticals | International | | Pharmaceuticals | |
| International | GmbH | | International | |
| AN-2898 | Anacor Pharmaceuticals Inc | [chemical structure] | AN-2898; PDE4 inhibitor (topical, psoriasis/atopic dermatitis), Anacor | Atopic dermatitis; Psoriasis |
| dual p38/PDE4 inhibitors (inflammation), c- a-i-r biosciences | c-a-i-r biosciences GmbH | [chemical structure] | CBS-3595; dual p38/PDE4 inhibitors (inflammation), c-a-i-r biosciences; dual p38/ phosphodiesterase 4 inhibitors (inflammation), c-a-i-r biosciences | Inflammatory disease |
| ASP-9831 | Astellas Pharma Inc | [chemical structure] | ASP-9831; PDE4 inhibitor (hepatitis), Astellas; PDE4 inhibitor (non-alcoholic steatohepatitis), Astellas | Non-alcoholic steatohepatitis |
| phospho- | VIA | | phosphodiesterase | Vasculitis |
| diesterase | Pharmaceuticals | | 4 inhibitors | |
| 4 inhibitors | Inc | | (vascular | |
| (vascular | | | inflammation), VIA | |
| inflammation), | | | Pharmaceuticals | |
| VIA | | | | |
| Pharmaceuticals | | | | |
| E-4021 | Eisai Co Ltd | [chemical structure] | 4- Piperidinecarboxylic acid, 1-[4-[(1,3- benzodioxol-5- ylmethyl)amino]- 6-chloro-2- guinazolinyl]-; E-4021 | Angina; Cardiac failure |
| piclamilast | Rhone- Poulenc SA | [chemical structure] | RP-73401; RPR-73401; piclamilast | Arthritis; Asthma |
| CD-160130 | Curacyte AG | | CD-160130; | Chronic |
| | | | PDE-4 inhibitor | lymphocytic |
| | | | (oral, B-CLL), | leukemia |
| | | | BlackSwan | |
| | | | Pharma; | |
| | | | PDE-4 inhibitor | |
| | | | (oral, B-CLL), | |
| | | | Curacyte | |
| | | | Discovery; | |
| | | | PDE-4 inhibitor | |
| | | | (oral, B-cell | |
| | | | chronic | |
| | | | lymphocytic | |
| | | | leukemia), | |
| | | | Curacyte | |
| | | | Discovery | |
| GSK-256066 (allergic rhinitis, intranasal formulation), GlaxoSmithKline | GlaxoSmith Kline plc | [chemical structure] | 256066; 256066 (allergic rhinitis, intranasal formulation), GlaxoSmithKline; GSK-256066; GSK-256066 (allergic rhinitis, intranasal formulation), GlaxoSmithKline | Allergic rhinitis |
| 4AZA-PDE4 | 4 AZA | | 4AZA-PDE4 | Immune |
| | Bioscience | | | disorder |
| | NV | | | |
| YM-393059 | Astellas Pharma Inc | [chemical structure] | YM-393059; dual PDE7A/PDE4 inhibitors (immune disorder), Astellas | Immune disorder |
| revamilast | Glenmark Pharmaceuticals Ltd | [chemical structure] | GRC-4039; PDE 4 inhibitor (inflammation), Glenmark; phosphodiesterase 4 inhibitor (inflammation), Glenmark; revamilast; revamilast (inflammation), Glenmark | Asthma; Inflammatory disease; Multiple sclerosis; Rheumatoid arthritis |
| AN-2728 | Anacor Pharmaceuticals Inc | [chemical structure] | AN-2728; EUCRISA; EUCRISA; Eucrysa; Eucrysa; PF- 06930164; crisaborole | |
| MK-0952 | Merck & Co Inc | [chemical structure] | MK-0952; MK-952; PDE4 inhibitor (AD), Merck & Co; phosphodiesterase type 4 inhibitor (Alzheimer's disease), Merck & Co | Alzheimer's disease |
| ibudilast (oral, neuropathic pain/opiate dependence/ neuro- degeneration/T BI/druq dependence), | Avigen Inc | [chemical structure] | AV-411; MN-166; glial activation inhibitor (oral, neuropathic pain/opiate dependence), Avigen; ibudilast; ibudilast (oral, | |
| MediciNova | | | neuropathic | |
| | | | pain/opiate | |
| | | | dependence/ | |
| | | | alcohol | |
| | | | dependence), | |
| | | | Avigen; | |
| | | | ibudilast (oral, | |
| | | | neuropathic | |
| | | | pain/opiate | |
| | | | dependence/ | |
| | | | neurodegeneration/ | |
| | | | TBI/drug | |
| | | | dependence), | |
| | | | MediciNova; | |
| | | | neurodegeneration | |
| | | | disease therapy, | |
| | | | Avigen; | |
| | | | neuropathic pain | |
| | | | therapy, Avigen | |
| GP-0203 | Centre | | GP-0203; | Asthma; |
| | National de la | | PDE 4 inhibitor | Chronic |
| | Recherche | | (COPD/asthma), | obstructive |
| | Scientifique | | CNRS | pulmonary |
| | (CNRS) | | | disease |
| dual PDE 3/4 | Scottish | | dual PDE 3/4 | Asthma |
| inhibitors (oral, | Biomedical | | inhibitors (oral, | |
| asthma), Scottish | Ltd | | asthma), Scottish | |
| Biomedical | | | Biomedical; | |
| | | | dual phospho- | |
| | | | diesterase | |
| | | | 3/4 inhibitors | |
| | | | (oral, asthma), | |
| | | | Scottish | |
| | | | Biomedical | |
| ELB-526 | elbion AG | | ELB-526; | Lung |
| | | | inhaled PDE 4 | inflammation |
| | | | inhibitor (lung | |
| | | | inflammation), | |
| | | | elbion; inhaled | |
| | | | phosphodiesterase | |
| | | | 4 inhibitor (lung | |
| | | | inflammation), | |
| | | | elbion | |
| theophylline (SODAS/Pharma Zome), Elan | Elan Corp plc | [chemical structure] | Teonova; Theolan; once-daily theophylline (SODAS), Elan; theophylline; theophylline (PharmaZome), Elan; theophylline (SODAS), Elan; | |
| | | | theophylline | |
| | | | (SODAS/ | |
| | | | PharmaZome), Elan; | |
| | | | theophylline, Elan; | |
| | | | twice-daily | |
| | | | theophylline | |
| | | | (PharmaZone), Elan | |
| CHF-6001 | Chiesi Farmaceutici SpA | [chemical structure] | CHF-5480; CHF-6001; PDE 4 inhibitors (inhalant formulation, COPD/asthma), Chiesi | |
| elbimilast | elbion AG | [chemical structure] | AWD-12-353; ELB-353; PDE4 inhibitor, BioTie; PDE4 inhibitor, elbion; elbimilast; ronomilast | |
| AWD-12-281 (topical cream), elbion/ GlaxoSmithKline | elbion AG | [chemical structure] | 842470; AWD-12-281; AWD-12-281 (dermatitis), elbion/ GlaxoSmithKline; AWD-12-281 (topical cream), elbion/ GlaxoSmithKline; GW-842470 | Atopic dermatitis |
| ibudilast (multiple sclerosis/ amyotrophic lateral sclerosis), MediciNova | Kyorin Pharmaceutical Co Ltd | [chemical structure] | Ketas; MN-166; ibudilast; ibudilast (multiple sclerosis), MediciNova; ibudilast (multiple sclerosis/ amyotrophic lateral sclerosis), | Neurological disease |
| | | | MediciNova | |
| PDE 4 inhibitors (asthma), Dainippon Sumitomo | Dainippon Pharmaceutical Co Ltd | [chemical structure] | OS-0217; PDE 4 inhibitors (asthma), Dainippon; PDE 4 inhibitors (asthma), Dainippon Sumitomo | Asthma |
| oglemilast | Glenmark Pharmaceuticals Ltd | [chemical structure] | GRC-3886; oglemilast; oglemilast (oral, COPD/asthma), Glenmark | Asthma; Chronic obstructive pulmonary disease; Rheumatoid arthritis |
| R-1627 | Roche | | R-1627 | Alzheimers |
| | Holding AG | | | disease |
| ND-1510 | Neuro3d SA | | ND-1510 | Depression |
| ND-1251 | Neuro3d SA | | ND-1251 | Depression |
| PDE4 inhibitors | Purdue | | PDE4 inhibitors | Asthma |
| (asthma), Purdue | Pharma LP | | (asthma), Purdue | |
| WAY-122331 | Wyeth- Ayerst Pharmaceuticals Inc | [chemical structure] | WAY-122331 | Cardiac failure |
| GRC-3566 | Glenmark | | GRC-3566 | Asthma; |
| | Pharmaceuticals | | | Chronic |
| | Ltd | | | obstructive |
| | | | | pulmonary |
| | | | | disease |
| tofimilast | Pfizer Inc | [chemical structure] | CP-325366; tofimilast | Allergy; Respiratory disease |
| BAY-61-9987 | Bayer AG | | BAY-61-9987; | Chronic |
| | | | low affinity | obstructive |
| | | | phosphodiesterase | pulmonary |
| | | | 4 inhibitor, Bayer | disease; |
| | | | | Respiratory |
| | | | | disease |
| rolipram | Bayer Schering Pharma AG | [chemical structure] | ME-3167; ZK-62711; rolipram | Asthma; Depression; HIV infection; Multiple sclerosis; Neurodegenerative disease; Tardive dyskinesia |
| MEM-1414 | Memory | | MEM-1414; | Alzheimers |
| | Pharmaceuticals | | PDE 4 inhibitor | disease; |
| | Corp | | (Alzheimer's), | Asthma |
| | | | Memory; | |
| | | | PDE 4 inhibitor | |
| | | | (Alzheimer's), | |
| | | | Memory/Roche; | |
| | | | R-1533 | |
| adenosine A3 antagonists, Novartis | Novartis AG | [chemical structure] | CGH-2466; CGS-2466; adenosine A3 antagonists, Novartis | Asthma |
| RPL-554 | King's College London | [chemical structure] | PDE 3/PDE 4 inhibitors, Kings College; PDE3/4 inhibitors (nasal, respiratory disease), Verona Pharma; PDE3/4 inhibitors (respiratory therapeutics), Rhinopharma; RPL-554; RPL-565; VMX-554; VMX-565; VRP-554; dual MRP4 | Allergic rhinitis |
| | | | and PDE3/4 | |
| | | | inhibitors | |
| | | | (nasal, respiratory | |
| | | | disease), Verona | |
| | | | Pharma; trequinsin | |
| | | | analogs (respiratory | |
| | | | therapeutics), Kings | |
| | | | College/Vernalis/ | |
| | | | Rhinopharma | |
| CT-5357 | UCB Celltech | [chemical structure] | CT-5357 | Inflammatory disease |
| etazolate | Diaxonhit | [chemical structure] | EHT-0202; SQ-20009; etazolate; etazolate hydrochloride | Alzheimers disease; Motor neurone disease; Neurodegenerative disease |
| Org-30029 | MSD OSS BV | [chemical structure] | Org-30029 | Asthma; Cardiac failure |
| PDE4 inhibitors (respiratory tract inflammation), Zambon | Zambon Co SpA | [chemical structure] | PDE4 inhibitors (respiratory tract inflammation), Zambon; Z-15370; Z-15370A | Respiratory tract inflammation |
| Orp-20241 | MSD OSS BV | [chemical structure] | Org-20241 | Asthma |
| PDE3/PDE4 inhibitors (inflammatory diseases), Leiden/ Amsterdam Center for Drug Research/Altana | Leiden/ Amsterdam Center for Drug Research | [chemical structure] | PDE3/PDE4 inhibitors (inflammatory diseases), Leiden/Amsterdam Center for Drug Research/Altana; PDE3/PDE4 inhibitors (inflammatory diseases), Leiden/ Amsterdam Center for Drug Research/ Byk Gulden | Asthma; Rheumatoid arthritis |
| arofylline | Almirall Prodesfarma SA | [chemical structure] | LAS-31025; arofylline | Asthma; Bronchitis; Chronic obstructive airway disease |
| KW-4490 | Kyowa Hakko Kogyo Co Ltd | [chemical structure] | KW-4490 | Asthma |
| HT-0712 | Inflazyme Pharmaceuticals | [chemical structure] | HT-0712; IPL-455903; small-molecule PDE4 inhibitors (memory disorders), Inflazyme/ Helicon | Amnesia; Cognitive disorder |
| PDE 4 inhibitors (asthma/COPD/ rheumatoid arthritis), Merck Frosst | UCB Celltech | [chemical structure] | CT-2450; CT-2820; CT-3883; CT-5210; L-454560; L-787258; L-791943; L-826141; L-869298; MK-0359; PDE 4 inhibitors (asthma/COPD/ rheumatoid arthritis), Merck Frosst; PDE 4 inhibitors, Celltech/Merck Frosst | Asthma; Chronic obstructive pulmonary disease; Rheumatoid arthritis |
| PDE inhibitors, | VIVUS Inc | | PDE 3 inhibitors, | Erectile |
| Vivus | | | Vivus | dysfunction |
| | | | PDE 4 inhibitors, | |
| | | | Vivus; PDE | |
| | | | inhibitors, Vivus; | |
| | | | PDE5 inhibitors, | |
| | | | Vivus; erectile | |
| | | | dysfunction | |
| | | | therapy, Vivus | |
| OX-914 | Inflazyme | | BLX-028914; | Asthma; |
| | Pharmaceuticals | | BLX-914; IPL-4088; | Chronic |
| | | | IPL-4182; IPL-42 | obstructive |
| | | | series; IPL-4722; | pulmonary |
| | | | OX-914; PDE4 | disease; |
| | | | inhibitors | Inflammatory |
| | | | (inflammation), | disease; |
| | | | Biolipox; | Seasonal |
| | | | PDE4 inhibitors | allergic |
| | | | (inflammation), | rhinitis |
| | | | Inflazyme; | |
| | | | PDE4 inhibitors | |
| | | | (inflammation), | |
| | | | Orexo | |
| SDZ-PDI-747 | Novartis AG | [chemical structure] | SDZ-PDI-747 | Atopic dermatitis |
| AP-0679 | The Green | | AP-0679 | Asthma |
| | Cross Corp | | | |
| Sch-351591 | UCB Celltech | [chemical structure] | D-4396; PDE 4 inhibitors, Schering- Plough/Celltech; PDE 4 inhibitors, Schering- Plough/ Chiroscience; Sch-351591; Sch-365351 | Asthma; Chronic obstructive pulmonary disease; Inflammatory disease |
| TA-7906 | Tanabe Seiyaku Co Ltd | [chemical structure] | PDE4 inhibitor (skin disease), Maruho; PDE4 inhibitors (inflammation), Tanabe Seiyaku; T-2585; T-2585.HCl; TA-7906 | Atopic dermatitis; Dermatological disease; Inflammatory disease |
| PDE4/MMP inhibitors, Rhone- Poulenc | Rhone- Poulenc Rorer Inc | [chemical structure] | HMR-1571; PDE4/MMP inhibitors, Rhone- Poulenc | Atherosclerosis; Atopic dermatitis; Multiple sclerosis; Psoriasis; Rheumatoid arthritis |
| lirimilast | Bayer AG | [chemical structure] | BAY-19-8004; lirimilast | Asthma; Chronic obstructive pulmonary disease |
| daxalipram | Bayer Schering Pharma AG | [chemical structure] | Mesopram; PDE 4 inhibitor (multiple sclerosis), Schering AG; SH-636; ZK-117137; daxalipram | Multiple sclerosis |
| roflumilast | Takeda GmbH | [chemical structure] | APTA-2217; B9302-107; BY-217; BYK-20869; Daliresp; Dalveza; Daxas; Libertek; Xevex; roflumilast; roflumist | Non-insulin dependent diabetes; Pulmonary fibrosis |
| PDE 4 inhibitors (asthma), Novartis | Novartis UK Ltd | [chemical structure] | NVP-ABE-171; PDE 4 inhibitors (asthma), Novartis; rolipram analogs, Novartis | Asthma; Chronic obstructive pulmonary disease |
| PDE III/IV | Novartis | | PDE III/IV | Asthma; |
| inhibitors | Pharma AG | | inhibitors, | Inflammatory |
| Novartis | | | Novartis | disease |
| SeICIDs Celcrene | Celgene Corp | [chemical structure] | CC-10036; CC-10083; CC-110007; CC-110036; CC-110037; CC-110038; CC-110049; CC-110052; CC-110083; CC-11069; CC-111050; CC-13039; CC-14046; CC-17034; CC-17035; | Autoimmune disease; Cancer; Congestive heart failure; Inflammatory disease; Respiratory disease |
| | | | CC-17075; | |
| | | | CC-17085; | |
| | | | CC-18062; | |
| | | | CC-7075; | |
| | | | PDE4/TNFalpha | |
| | | | inhibitors, Celgene; | |
| | | | SeICIDs, Celgene; | |
| | | | selective cytokine | |
| | | | inhibitory drugs, | |
| | | | Celgene | |
| RPR-117658 | Rhone- Poulenc Rorer Ltd | [chemical structure] | RPR-117658 | Inflammatory disease |
| AWD-12-281 (inhaled), elbion/ GlaxoSmithKline; | ASTA Medica AG | [chemical structure] | 842470; AWD-12-281; AWD-12-281 (COPD), elbion/ GlaxoSmithKline AWD-12-281 (asthma), elbion/ GlaxoSmithKline; AWD-12-281 (inhaled), elbion/ GlaxoSmithKline; | Asthma; Chronic obstructive pulmonary disease |
| | | | AWD-12-343; | |
| | | | GW-842470 | |
| 256066 (asthma, COPD, inhalant formulation), GlaxoSmithKline | SmithKline Beecham Pharmaceuticals | [chemical structure] | 256066; 256066 (asthma, COPD, inhalant formulation), GlaxoSmithKline; GSK-256066; GSK-256066 (asthma, COPD, inhalant formulation), GlaxoSmithKline; PDE 4 inhibitors | Asthma; Chronic obstructive pulmonary disease; Inflammatory disease |
| | | | (inhaled, | |
| | | | COPD/asthma/ | |
| | | | allergic rhinitis), | |
| | | | GlaxoSmithKline; | |
| | | | SB-207499 | |
| | | | analogs, GSK | |
| PDE4 inhibitors, | Aventis | | PDE4 inhibitors, | Autoimmune |
| Aventis | Pharma AG | | Aventis; | disease |
| | | | PDE4 inhibitors, | |
| | | | RPR; PDE4 | |
| | | | inhibitors, Rhone- | |
| | | | Poulenc Rorer | |
| arofylline derivatives, Almirall | Almirall Prodesfarma SA | [chemical structure] | arofylline derivatives, Almirall | Asthma; Inflammatory disease |
| RPR-132294 | Rhone- Poulenc Rorer Ltd | [chemical structure] | RPR-132294; RPR-132703 | Respiratory disease |
| ibudilast eye drops (ocular allergy), MSD Japan/Kyorin | Kyorin Pharmaceutical Co Ltd | [chemical structure] | Eyevinal; KC-404; Ketas (ocular); ibudilast; ibudilast eye drops (ocular allergy), Banyu/Kyorin; ibudilast eye drops (ocular allergy), | |
| | | | MSD Japan/ | |
| | | | Kyorin | |
| PDE 4 inhibitors (2), Pfizer | Pfizer Inc | [chemical structure] | CI-1018; CI-1044; PD-168787; PD-189659; PD-190036; PD-190749; PDE 4 inhibitors (2), Pfizer | Asthma; Inflammatory disease |
| YM-976 | Yamanouchi Pharmaceutical Co Ltd | [chemical structure] | PDE IV inhibitors, Yamanouchi; YM-976; phosphodiesterase inhibitors, Yamanouchi | Asthma |
| XT-611 | Kanazawa University | [chemical structure] | PDE IV inhibitor, Kanazawa University; XT-611 | Osteoporosis |
| losartan | Almirall | | losartan | Asthma |
| derivatives, | Prodesfarma | | derivatives, | |
| Almirall | SA | | Almirall | |
| DWP-205 derivatives, Daewoong | Daewoong Pharmaceutical Co Ltd | [chemical structure] | DWP-205 derivatives, Daewoong; DWP-205297; phosphodiesterase 4 inhibitors, Daewoong | Arthritis; Asthma |
| WAY-126120 | Wyeth-Ayerst | | PDE IV inhibitor, | Asthma |
| | Pharmaceuticals | | Wyeth-Ayerst; | |
| | Inc | | WAY-126120 | |
| YM-58997 | Yamanouchi Pharmaceutical Co Ltd | [chemical structure] | YM-58997 | Asthma |
| CP-293321 | Pfizer Inc | | CP-293321 | Inflammatory |
| | | | | disease |
| V-11294A | Napp Pharmaceutical Group Ltd | [chemical structure] | V-11294A; rolipram derivatives, Napp | Depression; Inflammatory disease |
| CH-3697 | Chiroscience | | CH-3697 | Asthma |
| | R&D Ltd | | | |
| CP-353164 | Pfizer Inc | [chemical structure] | CP-353164 | Rheumatoid arthritis |
| atizoram | Pfizer Inc | [chemical structure] | CP-80633; atizoram | Asthma; Dermatitis |
| D-4418 | Chiroscience R&D Ltd | [chemical structure] | D-4418 | Asthma; Inflammatory disease |
| RPR-114597 | Rhone- Poulenc Rorer Inc | [chemical structure] | RPR-114597 | Inflammatory disease |
| PDE 4 inhibitors (inflammation), Eli Lilly | ICOS Corp | [chemical structure] | IC-197; IC-246; IC-247; IC-485; IC-86518; IC-86518/ IC-86521; IC-86521; PDE 4 inhibitors (inflammation), Eli Lilly; PDE 4 inhibitors, ICOS | Chronic obstructive pulmonary disease; Inflammatory disease; Rheumatoid arthritis |
| PDE 4 inhibitors, Pfizer | Pfizer Inc | [chemical structure] | BHN; CP-220629; PDE 4 inhibitors, Pfizer; UK-500001 | Asthma; Chronic obstructive pulmonary disease |
| ZL-n-91 | Guanqzhou | | ZL-n-91, | |
| Guangzhou | Sinogen | | Guangzhou | |
| Sinogen | Pharmaceutical | | Sinogen | |
| Pharmaceutical | Co Ltd | | Pharmaceutical | |
| D-22888 | ASTA Medica AG | [chemical structure] | AWD-12-232; D-22888 | Allergy; Asthma |
| PDE4 PDE4 | Takeda | | PDE4 inhibitor | |
| inhibitor | Pharmaceutical | | (diabetic | |
| (diabetic | Co Ltd | | nephropathy), | |
| nephropathy), | | | Takeda | |
| Takeda | | | Pharmaceutical | |
| Pharmaceutical | | | | |
| GW-3600 | GlaxoSmithKline Inc | [chemical structure] | GW-3600; phosphodiesterase 4 inhibitor, Glaxo | Asthma; Inflammatory disease; Rheumatoid arthritis |

[chemical structure]

[0945] Additional examples of a small molecule that is a PDE4 inhibitor include: Apremilast (CC-10004; CC-110004; CDC-104; Otezla®; lead seCID (2); seCID); CC-1088 (CC-1088; CC-5048; CC-801; CDC-801; lead SelCID (1)); Tetomilast (OPC-6535); KF-19514; PF-06266047; SKF-107806; PDB-093; Tolafentrine (BY-4070); TAK-648; CH-928; CH-673; CH-422; ABI-4 (18F-PF-06445974; Fluorine-18-PF-06445974); roflumilast; Roflumilast N-oxide (APTA-2217; B9302-107; BY-217; BYK-20860; Daliresp®; Dalveza; Daxas®; Libertek; Xevex; roflumist); NVP-ABE-171; BYK-321084; WAY-127093B; NCS-613; SDZ-ISQ-844; GS-5759; Ro-20-1724; Hemay-005; KCA-1490; TVX-2706; Nitraquazone; Filaminast (PDA-641; WAY-PDA-641); LASSBio-596; ASP-3258; TAS-203; AN-2889; AN-5322; AN-6414; AN-6415; Iotamilast (E-6005; RVT-501); GPD-1116; Cipamfylline (BRL-61063; HEP-688); MNP-001; MS-23; MSP-001; K-34; KF-66490; AL-38583 (cilomast); ZL-N-91; Almirall; CDP-840; GSK-356728; Cilomilast (Ariflo; SB-207499); OCID-2987; AN-2898; CBS-3595; ASP-9831 (ASP9831); E-4021 (4-Piperidinecarboxylic acid, 1-[4-[(1,3-benzodioxol-5-ylmethyl)amino]-6-chloro-2-quinazolinyl]); Piclamilast (RP-73401; RPR-73401); CD-160130; GSK-256066 (256066); 4AZA-PDE4; YM-393059; Revamilast (GRC-4039); AN-2728 (PF-06930164; crisaborole (Eucrisa™)); MK-0952 (MK-952); Ibudilast (AV-411; MN-166; KC-404); GP-0203; ELB-526; Theophylline (Teonova); CHF-6001 (CHF-5480); Elbimilast (AWD-12-353; ELB-353; ronomilast); AWD-12-281 (842470); OS-0217; Oglemilast (GRC-3886); R-1627; ND-1510; ND-1251; WAY-122331; GRC-3566; Tofimilast (CP-325366); BAY-61-9987; Rolipram (ME-3167; ZK-62711); MEM-1414 (R-1533); Adenosine A3 antagonists (CGH-2466); RPL-554 (RPL-565; VMX-554; VMX-565; VRP-554; trequinsin analog); CT-5357; Etazolate (EHT-0202; SQ-20009; etazolate hydrochloride); Z-15370 (Z-15370A); Org-30029; Org-20241; Arofylline (LAS-31025); Arofylline derivatives; KW-4490; HT-0712 (IPL-455903); HT-0712; IPL-455903; CT-2450; CT-2820; CT-3883; CT-5210; L-454560; L-787258; L-791943; L-826141; L-869298; MK-0359; OX-914 (BLX-028914; BLX-914; IPL-4088; IPL-4182; IPL-4722); SDZ-PDI-747; AP-0679; Sch-351591 (D-4396; Sch-365351); TA-7906 (T-2585; TA-7906); HMR-1571; Lirimilast (BAY-19-8004); Daxalipram (Mesopram; SH-636; ZK-117137); SelCIs (CC-10036; CC-10083; CC-110007; CC-110036; CC-110037; CC-110038; CC-110049; CC-110052; CC-110083; CC-11069; CC-111050; CC-13039; CC-14046; CC-17034; CC-17035; CC-17075; CC-17085; CC-18062; CC-7075); RPR-117658; AWD-12-281 (842470; AWD-12-343; GW842470X); 256066 (GSK-256066; SB-207499); RPR-132294 (RPR-132703); CI-1018; CI-1044; PD-168787; PD-189659; PD-190036; PD-190749; YM-976; XT-611; Losartan derivatives; DWP-205 derivatives (DWP-205297); WAY-126120; YM-58997; CP-293321; V-11294A; CH-3697; CP-353164; Atizoram (CP-80633); D-4418; RPR-114597; IC-197; IC-246; IC-247; IC-485; IC-86518; IC-86518/IC-86521; IC-86521; CP-220629; ZL-n-91; D-22888 (AWD-12-232); GW-3600; GSK356278; TPI 1100; BPN14770; and MK-0873. See, e.g., Schafter et al. (2014) Cellular Signaling 26(9): 2016-2029); Gurney et al. (2011) Handb Exp Pharmacol 204: 167-192; Spadaccini et al. (2017) Intl J Mol Sciences 18: 1276; Bickston et al. (2012) Expert Opinion Invest Drugs 21:12, 1845-1849; Keshavarzian et al. (2007) Expert Opinion Invest Drugs 16:9, 1489-1506.

[0946] Additional examples of small molecules that are PDE4 inhibitors are described in, e.g., U.S. Patent Application Publication Nos. 2017/0348311, 20176/0319558, 2016/0213642, 2015/0328187, 2015/0306079, 2015/0272949, 2015/0272936, 2015/0080359, 2015/0051254, 2014/0350035, 2014/0148420, 2014/0121221, 2013/0252928, 2013/0237527, 2013/0225609, 2012/0309726, 2012/0196867, 2012/0088743, 2012/0059031, 2012/0035143, 2012/0028932, 2011/0021478, 2011/0021476, 2010/0234382, 2010/0129363, 2010/0069392, 2010/0056604, 2010/0048616, 2010/0048615, 2009/0099148, 2009/0093503, 2008/0287522, 2008/0255209, 2008/0255186, 2008/0221111, 2007/0232637, 2007/0208181, 2007/0167489, 2006/0269600, 2006/0183764, 2006/0154934, 2006/0094723, 2006/0079540, 2005/0267135, 2005/0234238, 2005/0033521, 2003/0229134, 2003/0220352, 2003/0212112, 2003/0158189, 2003/0069260, 2003/0050329, 2002/0058687, and 2002/0028842. Additional examples of small molecules that are PDE4 inhibitors are known in the art.

### Inhibitory Nucleic Acids

[0947] In some embodiments, a PDE4 inhibitor can be an inhibitory nucleic acid. In some embodiments, the inhibitory nucleic acid can be an antisense nucleic acid, a ribozyme, and a small interfering RNA (siRNA). Examples of aspects of these different oligonucleotides are described below. Any of the examples of inhibitory nucleic acids that can decrease expression of PDE4 mRNA in a mammalian cell can be synthesized in vitro.

[0948] Inhibitory nucleic acids that can decrease the expression of PDE4 mRNA expression in a mammalian cell include antisense nucleic acid molecules, i.e., nucleic acid molecules whose nucleotide sequence is complementary to all or part of an PDE4 mRNA (e.g., complementary to all or a part of any one of SEQ ID NOs: 1-5).

```
Human PDE4 mRNA Transcript Variant 1
(SEQ ID NO: 1)
      1 cggccgggcg cacccgcggg gccctgggct cgctggcttg cgcgcagctg agcggggtgt
    61 aggttggaag ggccagggcc ccctggggcg caagtggggg ccggcgccat ggaacccccg
  121 accgtcccct cggaaaggag cctgtctctg tcactgcccg ggccccggga gggccaggcc
  181 accctgaagc ctcccccgca gcacctgtgg cggcagcctc ggacccccat ccgtatccag
  241 cagcgcggct actccgacag cgcggagcgc gccgagcggg agcggcagcc gcaccggccc
  301 atagagcgcg ccgatgccat ggacaccagc gaccggcccg gcctgcgcac gacccgcatg
  361 tcctggccct cgtccttcca tggcactggc accggcagcg gcggcgcggg cggaggcagc
  421 agcaggcgct tcgaggcaga gaatgggccg acaccatctc ctggccgcag ccccctggac
  481 tcgcaggcga gcccaggact cgtgctgcac gccggggcgg ccaccagcca gcgccgggag
  541 tccttcctgt accgctcaga cagcgactat gacatgtcac ccaagaccat gtcccggaac
  601 tcatcggtca ccagcgaggc gcacgctgaa gacctcatcg taacaccatt tgctcaggtg
  661 ctggccagcc tccggagcgt ccgtagcaac ttctcactcc tgaccaatgt gcccgttccc
  721 agtaacaagc ggtccccgct gggcggcccc acccctgtct gcaaggccac gctgtcagaa
  781 gaaacgtgtc agcagttggc ccgggagact ctggaggagc tggactggtg tctggagcag
  841 ctggagacca tgcagaccta tcgctctgtc agcgagatgg cctcgcacaa gttcaaaagg
  901 atgttgaacc gtgagctcac acacctgtca gaaatgagca ggtccggaaa ccaggtctca
  961 gagtacattt ccacaacatt cctggacaaa cagaatgaag tggagatccc atcacccacg
1021 atgaaggaac gagaaaaaca gcaagcgccg cgaccaagac cctcccagcc gcccccgccc
1081 cctgtaccac acttacagcc catgtcccaa atcacagggt tgaaaaagtt gatgcatagt
1141 aacagcctga acaactctaa cattccccga tttggggtga agaccgatca agaagagctc
1201 ctggcccaag aactggagaa cctgaacaag tggggcctga acatcttttg cgtgtcggat
1261 tacgctggag gccgctcact cacctgcatc atgtacatga tattccagga gcgggacctg
1321 ctgaagaaat tccgcatccc tgtggacacg atggtgacat acatgctgac gctggaggat
1381 cactaccacg ctgacgtggc ctaccataac agcctgcacg cagctgacgt gctgcagtcc
1441 acccacgtac tgctggccac gcctgcacta gatgcagtgt tcacggacct ggagattctc
1501 gccgccctct tcgcggctgc catccacgat gtggatcacc ctggggtctc caaccagttc
1561 ctcatcaaca ccaattcgga gctggcgctc atgtacaacg atgagtcggt gctcgagaat
1621 caccacctgg ccgtgggctt caagctgctg caggaggaca actgcgacat cttccagaac
1681 ctcagcaagc gccagcggca gagcctacgc aagatggtca tcgacatggt gctggccacg
1741 gacatgtcca agcacatgac cctcctggct gacctgaaga ccatggtgga gaccaagaaa
1801 gtgaccagct caggggtcct cctgctagat aactactccg accgcatcca ggtcctccgg
1861 aacatggtgc actgtgccga cctcagcaac cccaccaagc cgctggagct gtaccgccag
1921 tggacagacc gcatcatggc cgagttcttc cagcagggtg accgagagcg cgagcgtggc
1981 atggaaatca gccccatgtg tgacaagcac actgcctccg tggagaagtc tcaggtgggt
2041 tttattgact acattgtgca cccattgtgg gagacctggg cggaccttgt ccacccagat
2101 gcccaggaga tcttggacac tttggaggac aaccgggact ggtactacag cgccatccgg
2161 cagagcccat ctccgccacc cgaggaggag tcaagggggc caggccaccc acccctgcct
2221 gacaagttcc agtttgagct gacgctggag gaggaagagg aggaagaaat atcaatggcc
2281 cagataccgt gcacagccca agaggcattg actgcgcagg gattgtcagg agtcgaggaa
2341 gctctggatg caaccatagc ctgggaggca tccccggccc aggagtcgtt ggaagttatg
2401 gcacaggaag catccctgga ggccgagctg gaggcagtgt atttgacaca gcaggcacag
2461 tccacaggca gtgcacctgt ggctccggat gagttctcgt cccgggagga attcgtggtt
2521 gctgtaagcc acagcagccc ctctgccctg gctcttcaaa gcccccttct ccctgcttgg
2581 aggaccctgt ctgtttcaga gcatgccccg ggcctcccgg gcctcccctc cacggcggcc
2641 gaggtggagg cccaacgaga gcaccaggct gccaagaggg cttgcagtgc ctgcgcaggg
2701 acatttgggg aggacacatc cgcactccca gctcctggtg gcggggggtc aggtggagac
2761 cctacctgat ccccagacct ctgtccctgt tcccctccac tcctcccctc actcccctgc
2821 tcccccgacc acctcctcct ctgcctcaaa gactcttgtc ctcttgtccc tcctgagaaa
2881 aaagaaaacg aaaagtgggg tttttttctg ttttcttttt ttcccctttc cccctgcccc
2941 cacccacggg gccttttttt ggaggtgggg gctggggaat gaggggctga ggtcccggaa
3001 gggattttat ttttttgaat tttaattgta acatttttag aaaaagaaca aaaaaagaaa
3061 aaaaaaagaa agaaacacag caactgtaga tgctcctgtt cctggttccc gctttccact
3121 tccaaatccc tcccctcacc ttcccccact gccccccaag ttccaggctc agtcttccag
3181 ccgcctgggg agtctctacc tgggcccaag caggtgtggg gcctccttct gggcttttct
3241 tctgaattta gaggatttct agaacgtggt caggaatagc cattctaggc ggggctgggg
3301 ccagggtggg gggcagtcac tgtgggaggt cccagctcca gcccccctct ggtttgctgc
3361 ctcctctccc ctctaaaaaa gtcttccgct tgattttgca caatcccggc gatactcctg
3421 gcgatactga ctagaaagtc agggagctgg gggagctgtt cactttagga tacgggggtg
3481 gtatggaagg gagcgttcac accgccagcc tcgggcctgg gatttgagga gggccctaga
3541 cctcctccac tctccatccc ctttcccttc cactttgggt tcactttgaa ttttctccgt
3601 tttttggggc agtggctctg atccactcac ccccccgccc cccgccccac ttctagctgc
3661 ttctcctctt gtttctgcct taataattcc cacggccaca ggcaaggggg ttgcagtggc
3721 cgcctgcacc ttggatgagg cagggccagg cgcccagaac ccccatcctg gccgcacccc
3781 cctttccagg gtcctccgga ccccaccttc cacactctga tcacagcccc cctacctttt
3841 gccctaggag gaagcaataa tggtgtatac cctcattctc attcctgggc agcccttcct
3901 tccaccctgg caccaaaata atttctcctc catccgtacc ttgcctagcc tctccctctc
3961 ccccagctag tccctgagca atacggcaga cagatgcaag accatttttc tccaagccat
4021 gggggactgt ttggaaggaa agccccctct ctccctcctc ccctcgccct cggcctggtt
4081 ctgcagctgg accgacctca ttcatcgcct gccccctacc caattctgag cacacggtac
4141 tgtagccccc agttcctccc tagccttcca tccctctgtc caccccaggg ggaggtaacc
4201 ccgcactcac actcccttga tgctgtctgt acagggttca tattttgtag cgaaagtcgt
4261 ttttgtccca gccggcgatc ggagtgggcc ttttctttct ttttgttcat tctttacctt
4321 tttttctttt ctttctttct tttttgtaca tactgtaagg ttggtttgta aattattcta
4381 cggaggcaaa aagggaaaat aaaaacttgc ccttccctgg ctgacccagt cgggaaggta
4441 gggaaggagg tctcccgttg ggagagtctc tgttcctgct gtattataca aactgtacca
4501 tagtcctggg aaaagggtgg actcaccgct gttgttttat gggaagtcgt gtcatcctag
4561 gggttggggc tgggcagagc ctgtcccctc cccccttctc caggagccag ggggtgactg
4621 gagagacaga cccaccccca agcagggctc ctctccccag ggtgagcaca ggacctctgt
4681 aagctgcttg tgtattgtcc actttgacga tcagtcattc ggtccgttga tcaataatcc
4741 ttcgatcttg tctccaatta aaccgaggct ttcaccgata aaaaaaaaaa aaaa
Human PDE4 mRNA Transcript Variant 2
(SEQ ID NO: 2)
      1 atggcgcggc cgcgcggcct aggccgcatc ccggagctgc aactggtggc cttcccggtg
    61 gcggtggcgg ctgaggacga ggcgttcctg cccgagcccc tggccccgcg cgcgccccgc
  121 cgcccgcgtt cgccgccctc ctcgcccgtc ttcttcgcca gcccgtcccc aactttccgc
  181 agacgccttc ggcttctccg cagctgccag gatttgggcc gccaggcttg ggctggggct
  241 ggcttcgagg cagagaatgg gccgacacca tctcctggcc gcagccccct ggactcgcag
  301 gcgagcccag gactcgtgct gcacgccggg gcggccacca gccagcgccg ggagtccttc
  361 ctgtaccgct cagacagcga ctatgacatg tcacccaaga ccatgtcccg gaactcatcg
  421 gtcaccagcg aggcgcacgc tgaagacctc atcgtaacac catttgctca ggtgctggcc
  481 agcctccgga gcgtccgtag caacttctca ctcctgacca atgtgcccgt tcccagtaac
  541 aagcggtccc cgctgggcgg ccccacccct gtctgcaagg ccacgctgtc agaagaaacg
  601 tgtcagcagt tggcccggga gactctggag gagctggact ggtgtctgga gcagctggag
  661 accatgcaga cctatcgctc tgtcagcgag atggcctcgc acaagttcaa aaggatgttg
  721 aaccgtgagc tcacacacct gtcagaaatg agcaggtccg gaaaccaggt ctcagagtac
  781 atttccacaa cattcctgga caaacagaat gaagtggaga tcccatcacc cacgatgaag
  841 gaacgagaaa aacagcaagc gccgcgacca agaccctccc agccgccccc gccccctgta
  901 ccacacttac agcccatgtc ccaaatcaca gggttgaaaa agttgatgca tagtaacagc
  961 ctgaacaact ctaacattcc ccgatttggg gtgaagaccg atcaagaaga gctcctggcc
1021 caagaactgg agaacctgaa caagtggggc ctgaacatct tttgcgtgtc ggattacgct
1081 ggaggccgct cactcacctg catcatgtac atgatattcc aggagcggga cctgctgaag
1141 aaattccgca tccctgtgga cacgatggtg acatacatgc tgacgctgga ggatcactac
1201 cacgctgacg tggcctacca taacagcctg cacgcagctg acgtgctgca gtccacccac
1261 gtactgctgg ccacgcctgc actagatgca gtgttcacgg acctggagat tctcgccgcc
1321 ctcttcgcgg ctgccatcca cgatgtggat caccctgggg tctccaacca gttcctcatc
1381 aacaccaatt cggagctggc gctcatgtac aacgatgagt cggtgctcga gaatcaccac
1441 ctggccgtgg gcttcaagct gctgcaggag gacaactgcg acatcttcca gaacctcagc
1501 aagcgccagc ggcagagcct acgcaagatg gtcatcgaca tggtgctggc cacggacatg
1561 tccaagcaca tgaccctcct ggctgacctg aagaccatgg tggagaccaa gaaagtgacc
1621 agctcagggg tcctcctgct agataactac tccgaccgca tccaggtcct ccggaacatg
1681 gtgcactgtg ccgacctcag caaccccacc aagccgctgg agctgtaccg ccagtggaca
1741 gaccgcatca tggccgagtt cttccagcag ggtgaccgag agcgcgagcg tggcatggaa
1801 atcagcccca tgtgtgacaa gcacactgcc tccgtggaga agtctcaggt gggttttatt
1861 gactacattg tgcacccatt gtgggagacc tgggcggacc ttgtccaccc agatgcccag
1921 gagatcttgg acactttgga ggacaaccgg gactggtact acagcgccat ccggcagagc
1981 ccatctccgc cacccgagga ggagtcaagg gggccaggcc acccacccct gcctgacaag
2041 ttccagtttg agctgacgct ggaggaggaa gaggaggaag aaatatcaat ggcccagata
2101 ccgtgcacag cccaagaggc attgactgcg cagggattgt caggagtcga ggaagctctg
2161 gatgcaacca tagcctggga ggcatccccg gcccaggagt cgttggaagt tatggcacag
2221 gaagcatccc tggaggccga gctggaggca gtgtatttga cacagcaggc acagtccaca
2281 ggcagtgcac ctgtggctcc ggatgagttc tcgtcccggg aggaattcgt ggttgctgta
2341 agccacagca gcccctctgc cctggctctt caaagccccc ttctccctgc ttggaggacc
2401 ctgtctgttt cagagcatgc cccgggcctc ccgggcctcc cctccacggc ggccgaggtg
2461 gaggcccaac gagagcacca ggctgccaag agggcttgca gtgcctgcgc agggacattt
2521 ggggaggaca catccgcact cccagctcct ggtggcgggg ggtcaggtgg agaccctacc
2581 tgatccccag acctctgtcc ctgttcccct ccactcctcc cctcactccc ctgctccccc
2641 gaccacctcc tcctctgcct caaagactct tgtcctcttg tccctcctga gaaaaaagaa
2701 aacgaaaagt ggggtttttt tctgttttct ttttttcccc tttccccctg cccccaccca
2761 cggggccttt ttttggaggt gggggctggg gaatgagggg ctgaggtccc ggaagggatt
2821 ttattttttt gaattttaat tgtaacattt ttagaaaaag aacaaaaaaa gaaaaaaaaa
2881 agaaagaaac acagcaactg tagatgctcc tgttcctggt tcccgctttc cacttccaaa
2941 tccctcccct caccttcccc cactgccccc caagttccag gctcagtctt ccagccgcct
3001 ggggagtctc tacctgggcc caagcaggtg tggggcctcc ttctgggctt ttcttctgaa
3061 tttagaggat ttctagaacg tggtcaggaa tagccattct aggcggggct ggggccaggg
3121 tggggggcag tcactgtggg aggtcccagc tccagccccc ctctggtttg ctgcctcctc
3181 tcccctctaa aaaagtcttc cgcttgattt tgcacaatcc cggcgatact cctggcgata
3241 ctgactagaa agtcagggag ctgggggagc tgttcacttt aggatacggg ggtggtatgg
3301 aagggagcgt tcacaccgcc agcctcgggc ctgggatttg aggagggccc tagacctcct
3361 ccactctcca tcccctttcc cttccacttt gggttcactt tgaattttct ccgttttttg
3421 gggcagtggc tctgatccac tcaccccccc gccccccgcc ccacttctag ctgcttctcc
3481 tcttgtttct gccttaataa ttcccacggc cacaggcaag ggggttgcag tggccgcctg
3541 caccttggat gaggcagggc caggcgccca gaacccccat cctggccgca cccccctttc
3601 cagggtcctc cggaccccac cttccacact ctgatcacag cccccctacc ttttgcccta
3661 ggaggaagca ataatggtgt ataccctcat tctcattcct gggcagccct tccttccacc
3721 ctggcaccaa aataatttct cctccatccg taccttgcct agcctctccc tctcccccag
3781 ctagtccctg agcaatacgg cagacagatg caagaccatt tttctccaag ccatggggga
3841 ctgtttggaa ggaaagcccc ctctctccct cctcccctcg ccctcggcct ggttctgcag
3901 ctggaccgac ctcattcatc gcctgccccc tacccaattc tgagcacacg gtactgtagc
3961 ccccagttcc tccctagcct tccatccctc tgtccacccc agggggaggt aaccccgcac
4021 tcacactccc ttgatgctgt ctgtacaggg ttcatatttt gtagcgaaag tcgtttttgt
4081 cccagccggc gatcggagtg ggccttttct ttctttttgt tcattcttta cctttttttc
4141 ttttctttct ttcttttttg tacatactgt aaggttggtt tgtaaattat tctacggagg
4201 caaaaaggga aaataaaaac ttgcccttcc ctggctgacc cagtcgggaa ggtagggaag
4261 gaggtctccc gttgggagag tctctgttcc tgctgtatta tacaaactgt accatagtcc
4321 tgggaaaagg gtggactcac cgctgttgtt ttatgggaag tcgtgtcatc ctaggggttg
4381 gggctgggca gagcctgtcc cctcccccct tctccaggag ccagggggtg actggagaga
4441 cagacccacc cccaagcagg gctcctctcc ccagggtgag cacaggacct ctgtaagctg
4501 cttgtgtatt gtccactttg acgatcagtc attcggtccg ttgatcaata atccttcgat
4561 cttgtctcca attaaaccga ggctttcacc gataaaaaaa aaaaaaaa
Human PDE4 mRNA Transcript Variant 3
(SEQ ID NO: 3)
      1 atgcgctccg gtgcagcgcc ccgggcccgg ccccggcccc ctgccctggc actgcccccc
    61 acgggccccg agtccctgac ccacttcccc ttcagcgatg aggacacccg tcggcaccct
  121 ccgggcagat ctgtcagctt cgaggcagag aatgggccga caccatctcc tggccgcagc
  181 cccctggact cgcaggcgag cccaggactc gtgctgcacg ccggggcggc caccagccag
  241 cgccgggagt ccttcctgta ccgctcagac agcgactatg acatgtcacc caagaccatg
  301 tcccggaact catcggtcac cagcgaggcg cacgctgaag acctcatcgt aacaccattt
  361 gctcaggtgc tggccagcct ccggagcgtc cgtagcaact tctcactcct gaccaatgtg
  421 cccgttccca gtaacaagcg gtccccgctg ggcggcccca cccctgtctg caaggccacg
  481 ctgtcagaag aaacgtgtca gcagttggcc cgggagactc tggaggagct ggactggtgt
  541 ctggagcagc tggagaccat gcagacctat cgctctgtca gcgagatggc ctcgcacaag
  601 ttcaaaagga tgttgaaccg tgagctcaca cacctgtcag aaatgagcag gtccggaaac
  661 caggtctcag agtacatttc cacaacattc ctggacaaac agaatgaagt ggagatccca
  721 tcacccacga tgaaggaacg agaaaaacag caagcgccgc gaccaagacc ctcccagccg
  781 cccccgcccc ctgtaccaca cttacagccc atgtcccaaa tcacagggtt gaaaaagttg
  841 atgcatagta acagcctgaa caactctaac attccccgat ttggggtgaa gaccgatcaa
  901 gaagagctcc tggcccaaga actggagaac ctgaacaagt ggggcctgaa catcttttgc
  961 gtgtcggatt acgctggagg ccgctcactc acctgcatca tgtacatgat attccaggag
1021 cgggacctgc tgaagaaatt ccgcatccct gtggacacga tggtgacata catgctgacg
1081 ctggaggatc actaccacgc tgacgtggcc taccataaca gcctgcacgc agctgacgtg
1141 ctgcagtcca cccacgtact gctggccacg cctgcactag atgcagtgtt cacggacctg
1201 gagattctcg ccgccctctt cgcggctgcc atccacgatg tggatcaccc tggggtctcc
1261 aaccagttcc tcatcaacac caattcggag ctggcgctca tgtacaacga tgagtcggtg
1321 ctcgagaatc accacctggc cgtgggcttc aagctgctgc aggaggacaa ctgcgacatc
1381 ttccagaacc tcagcaagcg ccagcggcag agcctacgca agatggtcat cgacatggtg
1441 ctggccacgg acatgtccaa gcacatgacc ctcctggctg acctgaagac catggtggag
1501 accaagaaag tgaccagctc aggggtcctc ctgctagata actactccga ccgcatccag
1561 gtcctccgga acatggtgca ctgtgccgac ctcagcaacc ccaccaagcc gctggagctg
1621 taccgccagt ggacagaccg catcatggcc gagttcttcc agcagggtga ccgagagcgc
1681 gagcgtggca tggaaatcag ccccatgtgt gacaagcaca ctgcctccgt ggagaagtct
1741 caggtgggtt ttattgacta cattgtgcac ccattgtggg agacctgggc ggaccttgtc
1801 cacccagatg cccaggagat cttggacact ttggaggaca accgggactg gtactacagc
1861 gccatccggc agagcccatc tccgccaccc gaggaggagt caagggggcc aggccaccca
1921 cccctgcctg acaagttcca gtttgagctg acgctggagg aggaagagga ggaagaaata
1981 tcaatggccc agataccgtg cacagcccaa gaggcattga ctgcgcaggg attgtcagga
2041 gtcgaggaag ctctggatgc aaccatagcc tgggaggcat ccccggccca ggagtcgttg
2101 gaagttatgg cacaggaagc atccctggag gccgagctgg aggcagtgta tttgacacag
2161 caggcacagt ccacaggcag tgcacctgtg gctccggatg agttctcgtc ccgggaggaa
2221 ttcgtggttg ctgtaagcca cagcagcccc tctgccctgg ctcttcaaag cccccttctc
2281 cctgcttgga ggaccctgtc tgtttcagag catgccccgg gcctcccggg cctcccctcc
2341 acggcggccg aggtggaggc ccaacgagag caccaggctg ccaagagggc ttgcagtgcc
2401 tgcgcaggga catttgggga ggacacatcc gcactcccag ctcctggtgg cggggggtca
2461 ggtggagacc ctacctgatc cccagacctc tgtccctgtt cccctccact cctcccctca
2521 ctcccctgct cccccgacca cctcctcctc tgcctcaaag actcttgtcc tcttgtccct
2581 cctgagaaaa aagaaaacga aaagtggggt ttttttctgt tttctttttt tcccctttcc
2641 ccctgccccc acccacgggg cctttttttg gaggtggggg ctggggaatg aggggctgag
2701 gtcccggaag ggattttatt tttttgaatt ttaattgtaa catttttaga aaaagaacaa
2761 aaaaagaaaa aaaaaagaaa gaaacacagc aactgtagat gctcctgttc ctggttcccg
2821 ctttccactt ccaaatccct cccctcacct tcccccactg ccccccaagt tccaggctca
2881 gtcttccagc cgcctgggga gtctctacct gggcccaagc aggtgtgggg cctccttctg
2941 ggcttttctt ctgaatttag aggatttcta gaacgtggtc aggaatagcc attctaggcg
3001 gggctggggc cagggtgggg ggcagtcact gtgggaggtc ccagctccag cccccctctg
3061 gtttgctgcc tcctctcccc tctaaaaaag tcttccgctt gattttgcac aatcccggcg
3121 atactcctgg cgatactgac tagaaagtca gggagctggg ggagctgttc actttaggat
3181 acgggggtgg tatggaaggg agcgttcaca ccgccagcct cgggcctggg atttgaggag
3241 ggccctagac ctcctccact ctccatcccc tttcccttcc actttgggtt cactttgaat
3301 tttctccgtt ttttggggca gtggctctga tccactcacc cccccgcccc ccgccccact
3361 tctagctgct tctcctcttg tttctgcctt aataattccc acggccacag gcaagggggt
3421 tgcagtggcc gcctgcacct tggatgaggc agggccaggc gcccagaacc cccatcctgg
3481 ccgcaccccc ctttccaggg tcctccggac cccaccttcc acactctgat cacagccccc
3541 ctaccttttg ccctaggagg aagcaataat ggtgtatacc ctcattctca ttcctgggca
3601 gcccttcctt ccaccctggc accaaaataa tttctcctcc atccgtacct tgcctagcct
3661 ctccctctcc cccagctagt ccctgagcaa tacggcagac agatgcaaga ccatttttct
3721 ccaagccatg ggggactgtt tggaaggaaa gccccctctc tccctcctcc cctcgccctc
3781 ggcctggttc tgcagctgga ccgacctcat tcatcgcctg ccccctaccc aattctgagc
3841 acacggtact gtagccccca gttcctccct agccttccat ccctctgtcc accccagggg
3901 gaggtaaccc cgcactcaca ctcccttgat gctgtctgta cagggttcat attttgtagc
3961 gaaagtcgtt tttgtcccag ccggcgatcg gagtgggcct tttctttctt tttgttcatt
4021 ctttaccttt ttttcttttc tttctttctt ttttgtacat actgtaaggt tggtttgtaa
4081 attattctac ggaggcaaaa agggaaaata aaaacttgcc cttccctggc tgacccagtc
4141 gggaaggtag ggaaggaggt ctcccgttgg gagagtctct gttcctgctg tattatacaa
4201 actgtaccat agtcctggga aaagggtgga ctcaccgctg ttgttttatg ggaagtcgtg
4261 tcatcctagg ggttggggct gggcagagcc tgtcccctcc ccccttctcc aggagccagg
4321 gggtgactgg agagacagac ccacccccaa gcagggctcc tctccccagg gtgagcacag
4381 gacctctgta agctgcttgt gtattgtcca ctttgacgat cagtcattcg gtccgttgat
4441 caataatcct tcgatcttgt ctccaattaa accgaggctt tcaccgataa aaaaaaaaaa
4501 aaa
Human PDE4 mRNA Transcript Variant 4
(SEQ ID NO: 4)
      1 tccgcagcct cctcctggga cccttgccct gcccccctcc catgggcacg gaccccccac
    61 cgcctccacc cactgccgcg ggggggcccg ttggggccca gggctggcgg gccatgtaac
  121 cagggctgct gctgggagcg cggaggggaa gggagccccc agccctgctg ggccggccca
  181 ggcccctccg cggctccccc ttccactacc cacctgcccg gcaccccctc cccagtggtt
  241 gttaaccccg ggactcccca agcccagcct ctgtgtgcag cagccccagg cgggctaagt
  301 ctccaagatg cccttggtgg atttcttctg cgagacctgc tctaagcctt ggctggtggg
  361 ctggtgggac cagttcaaaa ggatgttgaa ccgtgagctc acacacctgt cagaaatgag
  421 caggtccgga aaccaggtct cagagtacat ttccacaaca ttcctggaca aacagaatga
  481 agtggagatc ccatcaccca cgatgaagga acgagaaaaa cagcaagcgc cgcgaccaag
  541 accctcccag ccgcccccgc cccctgtacc acacttacag cccatgtccc aaatcacagg
  601 gttgaaaaag ttgatgcata gtaacagcct gaacaactct aacattcccc gatttggggt
  661 gaagaccgat caagaagagc tcctggccca agaactggag aacctgaaca agtggggcct
  721 gaacatcttt tgcgtgtcgg attacgctgg aggccgctca ctcacctgca tcatgtacat
  781 gatattccag gagcgggacc tgctgaagaa attccgcatc cctgtggaca cgatggtgac
  841 atacatgctg acgctggagg atcactacca cgctgacgtg gcctaccata acagcctgca
  901 cgcagctgac gtgctgcagt ccacccacgt actgctggcc acgcctgcac tagatgcagt
  961 gttcacggac ctggagattc tcgccgccct cttcgcggct gccatccacg atgtggatca
1021 ccctggggtc tccaaccagt tcctcatcaa caccaattcg gagctggcgc tcatgtacaa
1081 cgatgagtcg gtgctcgaga atcaccacct ggccgtgggc ttcaagctgc tgcaggagga
1141 caactgcgac atcttccaga acctcagcaa gcgccagcgg cagagcctac gcaagatggt
1201 catcgacatg gtgctggcca cggacatgtc caagcacatg accctcctgg ctgacctgaa
1261 gaccatggtg gagaccaaga aagtgaccag ctcaggggtc ctcctgctag ataactactc
1321 cgaccgcatc caggtcctcc ggaacatggt gcactgtgcc gacctcagca accccaccaa
1381 gccgctggag ctgtaccgcc agtggacaga ccgcatcatg gccgagttct tccagcaggg
1441 tgaccgagag cgcgagcgtg gcatggaaat cagccccatg tgtgacaagc acactgcctc
1501 cgtggagaag tctcaggtgg gttttattga ctacattgtg cacccattgt gggagacctg
1561 ggcggacctt gtccacccag atgcccagga gatcttggac actttggagg acaaccggga
1621 ctggtactac agcgccatcc ggcagagccc atctccgcca cccgaggagg agtcaagggg
1681 gccaggccac ccacccctgc ctgacaagtt ccagtttgag ctgacgctgg aggaggaaga
1741 ggaggaagaa atatcaatgg cccagatacc gtgcacagcc caagaggcat tgactgcgca
1801 gggattgtca ggagtcgagg aagctctgga tgcaaccata gcctgggagg catccccggc
1861 ccaggagtcg ttggaagtta tggcacagga agcatccctg gaggccgagc tggaggcagt
1921 gtatttgaca cagcaggcac agtccacagg cagtgcacct gtggctccgg atgagttctc
1981 gtcccgggag gaattcgtgg ttgctgtaag ccacagcagc ccctctgccc tggctcttca
2041 aagccccctt ctccctgctt ggaggaccct gtctgtttca gagcatgccc cgggcctccc
2101 gggcctcccc tccacggcgg ccgaggtgga ggcccaacga gagcaccagg ctgccaagag
2161 ggcttgcagt gcctgcgcag ggacatttgg ggaggacaca tccgcactcc cagctcctgg
2221 tggcgggggg tcaggtggag accctacctg atccccagac ctctgtccct gttcccctcc
2281 actcctcccc tcactcccct gctcccccga ccacctcctc ctctgcctca aagactcttg
2341 tcctcttgtc cctcctgaga aaaaagaaaa cgaaaagtgg ggtttttttc tgttttcttt
2401 ttttcccctt tccccctgcc cccacccacg gggccttttt ttggaggtgg gggctgggga
2461 atgaggggct gaggtcccgg aagggatttt atttttttga attttaattg taacattttt
2521 agaaaaagaa caaaaaaaga aaaaaaaaag aaagaaacac agcaactgta gatgctcctg
2581 ttcctggttc ccgctttcca cttccaaatc cctcccctca ccttccccca ctgcccccca
2641 agttccaggc tcagtcttcc agccgcctgg ggagtctcta cctgggccca agcaggtgtg
2701 gggcctcctt ctgggctttt cttctgaatt tagaggattt ctagaacgtg gtcaggaata
2761 gccattctag gcggggctgg ggccagggtg gggggcagtc actgtgggag gtcccagctc
2821 cagcccccct ctggtttgct gcctcctctc ccctctaaaa aagtcttccg cttgattttg
2881 cacaatcccg gcgatactcc tggcgatact gactagaaag tcagggagct gggggagctg
2941 ttcactttag gatacggggg tggtatggaa gggagcgttc acaccgccag cctcgggcct
3001 gggatttgag gagggcccta gacctcctcc actctccatc ccctttccct tccactttgg
3061 gttcactttg aattttctcc gttttttggg gcagtggctc tgatccactc acccccccgc
3121 cccccgcccc acttctagct gcttctcctc ttgtttctgc cttaataatt cccacggcca
3181 caggcaaggg ggttgcagtg gccgcctgca ccttggatga ggcagggcca ggcgcccaga
3241 acccccatcc tggccgcacc cccctttcca gggtcctccg gaccccacct tccacactct
3301 gatcacagcc cccctacctt ttgccctagg aggaagcaat aatggtgtat accctcattc
3361 tcattcctgg gcagcccttc cttccaccct ggcaccaaaa taatttctcc tccatccgta
3421 ccttgcctag cctctccctc tcccccagct agtccctgag caatacggca gacagatgca
3481 agaccatttt tctccaagcc atgggggact gtttggaagg aaagccccct ctctccctcc
3541 tcccctcgcc ctcggcctgg ttctgcagct ggaccgacct cattcatcgc ctgcccccta
3601 cccaattctg agcacacggt actgtagccc ccagttcctc cctagccttc catccctctg
3661 tccaccccag ggggaggtaa ccccgcactc acactccctt gatgctgtct gtacagggtt
3721 catattttgt agcgaaagtc gtttttgtcc cagccggcga tcggagtggg ccttttcttt
3781 ctttttgttc attctttacc tttttttctt ttctttcttt cttttttgta catactgtaa
3841 ggttggtttg taaattattc tacggaggca aaaagggaaa ataaaaactt gcccttccct
3901 ggctgaccca gtcgggaagg tagggaagga ggtctcccgt tgggagagtc tctgttcctg
3961 ctgtattata caaactgtac catagtcctg ggaaaagggt ggactcaccg ctgttgtttt
4021 atgggaagtc gtgtcatcct aggggttggg gctgggcaga gcctgtcccc tccccccttc
4081 tccaggagcc agggggtgac tggagagaca gacccacccc caagcagggc tcctctcccc
4141 agggtgagca caggacctct gtaagctgct tgtgtattgt ccactttgac gatcagtcat
4201 tcggtccgtt gatcaataat ccttcgatct tgtctccaat taaaccgagg ctttcaccga
4261 taaaaaaaaa aaaaaa
Human PDE4 mRNA Transcript Variant 5
(SEQ ID NO: 5)
      1 cgtcacgccc caggagaggc aataggaggc cctggccctg ccgacatggc caccgcagtc
    61 ccaacggcgc gctaggttgg cgagatgaag aggagtcgca gtgccctgtc cgtggcaggg
  121 accggggacg agaggtcgag ggagaccccc gaatccgacc gtgccaacat gctgggggcc
  181 gacctgcgtc gccctcgccg ccgcctctcg tccggtcctg gcctgggctg ggcccagcct
  241 gagccctcgg accctggggt ccctctgccg ccacggccca ccaccctgcc gctgctgatc
  301 ccaccgcgga tttccatcac cagggccgag aacgacagct tcgaggcaga gaatgggccg
  361 acaccatctc ctggccgcag ccccctggac tcgcaggcga gcccaggact cgtgctgcac
  421 gccggggcgg ccaccagcca gcgccgggag tccttcctgt accgctcaga cagcgactat
  481 gacatgtcac ccaagaccat gtcccggaac tcatcggtca ccagcgaggc gcacgctgaa
  541 gacctcatcg taacaccatt tgctcaggtg ctggccagcc tccggagcgt ccgtagcaac
  601 ttctcactcc tgaccaatgt gcccgttccc agtaacaagc ggtccccgct gggcggcccc
  661 acccctgtct gcaaggccac gctgtcagaa gaaacgtgtc agcagttggc ccgggagact
  721 ctggaggagc tggactggtg tctggagcag ctggagacca tgcagaccta tcgctctgtc
  781 agcgagatgg cctcgcacaa gttcaaaagg atgttgaacc gtgagctcac acacctgtca
  841 gaaatgagca ggtccggaaa ccaggtctca gagtacattt ccacaacatt cctggacaaa
  901 cagaatgaag tggagatccc atcacccacg atgaaggaac gagaaaaaca gcaagcgccg
  961 cgaccaagac cctcccagcc gcccccgccc cctgtaccac acttacagcc catgtcccaa
1021 atcacagggt tgaaaaagtt gatgcatagt aacagcctga acaactctaa cattccccga
1081 tttggggtga agaccgatca agaagagctc ctggcccaag aactggagaa cctgaacaag
1141 tggggcctga acatcttttg cgtgtcggat tacgctggag gccgctcact cacctgcatc
1201 atgtacatga tattccagga gcgggacctg ctgaagaaat tccgcatccc tgtggacacg
1261 atggtgacat acatgctgac gctggaggat cactaccacg ctgacgtggc ctaccataac
1321 agcctgcacg cagctgacgt gctgcagtcc acccacgtac tgctggccac gcctgcacta
1381 gatgcagtgt tcacggacct ggagattctc gccgccctct tcgcggctgc catccacgat
1441 gtggatcacc ctggggtctc caaccagttc ctcatcaaca ccaattcgga gctggcgctc
1501 atgtacaacg atgagtcggt gctcgagaat caccacctgg ccgtgggctt caagctgctg
1561 caggaggaca actgcgacat cttccagaac ctcagcaagc gccagcggca gagcctacgc
1621 aagatggtca tcgacatggt gctggccacg gacatgtcca agcacatgac cctcctggct
1681 gacctgaaga ccatggtgga gaccaagaaa gtgaccagct caggggtcct cctgctagat
1741 aactactccg accgcatcca ggtcctccgg aacatggtgc actgtgccga cctcagcaac
1801 cccaccaagc cgctggagct gtaccgccag tggacagacc gcatcatggc cgagttcttc
1861 cagcagggtg accgagagcg cgagcgtggc atggaaatca gccccatgtg tgacaagcac
1921 actgcctccg tggagaagtc tcaggtgggt tttattgact acattgtgca cccattgtgg
1981 gagacctggg cggaccttgt ccacccagat gcccaggaga tcttggacac tttggaggac
2041 aaccgggact ggtactacag cgccatccgg cagagcccat ctccgccacc cgaggaggag
2101 tcaagggggc caggccaccc acccctgcct gacaagttcc agtttgagct gacgctggag
2161 gaggaagagg aggaagaaat atcaatggcc cagataccgt gcacagccca agaggcattg
2221 actgcgcagg gattgtcagg agtcgaggaa gctctggatg caaccatagc ctgggaggca
2281 tccccggccc aggagtcgtt ggaagttatg gcacaggaag catccctgga ggccgagctg
2341 gaggcagtgt atttgacaca gcaggcacag tccacaggca gtgcacctgt ggctccggat
2401 gagttctcgt cccgggagga attcgtggtt gctgtaagcc acagcagccc ctctgccctg
2461 gctcttcaaa gcccccttct ccctgcttgg aggaccctgt ctgtttcaga gcatgccccg
2521 ggcctcccgg gcctcccctc cacggcggcc gaggtggagg cccaacgaga gcaccaggct
2581 gccaagaggg cttgcagtgc ctgcgcaggg acatttgggg aggacacatc cgcactccca
2641 gctcctggtg gcggggggtc aggtggagac cctacctgat ccccagacct ctgtccctgt
2701 tcccctccac tcctcccctc actcccctgc tcccccgacc acctcctcct ctgcctcaaa
2761 gactcttgtc ctcttgtccc tcctgagaaa aaagaaaacg aaaagtgggg tttttttctg
2821 ttttcttttt ttcccctttc cccctgcccc cacccacggg gccttttttt ggaggtgggg
2881 gctggggaat gaggggctga ggtcccggaa gggattttat ttttttgaat tttaattgta
2941 acatttttag aaaaagaaca aaaaaagaaa aaaaaaagaa agaaacacag caactgtaga
3001 tgctcctgtt cctggttccc gctttccact tccaaatccc tcccctcacc ttcccccact
3061 gccccccaag ttccaggctc agtcttccag ccgcctgggg agtctctacc tgggcccaag
3121 caggtgtggg gcctccttct gggcttttct tctgaattta gaggatttct agaacgtggt
3181 caggaatagc cattctaggc ggggctgggg ccagggtggg gggcagtcac tgtgggaggt
3241 cccagctcca gcccccctct ggtttgctgc ctcctctccc ctctaaaaaa gtcttccgct
3301 tgattttgca caatcccggc gatactcctg gcgatactga ctagaaagtc agggagctgg
3361 gggagctgtt cactttagga tacgggggtg gtatggaagg gagcgttcac accgccagcc
3421 tcgggcctgg gatttgagga gggccctaga cctcctccac tctccatccc ctttcccttc
3481 cactttgggt tcactttgaa ttttctccgt tttttggggc agtggctctg atccactcac
3541 ccccccgccc cccgccccac ttctagctgc ttctcctctt gtttctgcct taataattcc
3601 cacggccaca ggcaaggggg ttgcagtggc cgcctgcacc ttggatgagg cagggccagg
3661 cgcccagaac ccccatcctg gccgcacccc cctttccagg gtcctccgga ccccaccttc
3721 cacactctga tcacagcccc cctacctttt gccctaggag gaagcaataa tggtgtatac
3781 cctcattctc attcctgggc agcccttcct tccaccctgg caccaaaata atttctcctc
3841 catccgtacc ttgcctagcc tctccctctc ccccagctag tccctgagca atacggcaga
3901 cagatgcaag accatttttc tccaagccat gggggactgt ttggaaggaa agccccctct
3961 ctccctcctc ccctcgccct cggcctggtt ctgcagctgg accgacctca ttcatcgcct
4021 gccccctacc caattctgag cacacggtac tgtagccccc agttcctccc tagccttcca
4081 tccctctgtc caccccaggg ggaggtaacc ccgcactcac actcccttga tgctgtctgt
4141 acagggttca tattttgtag cgaaagtcgt ttttgtccca gccggcgatc ggagtgggcc
4201 ttttctttct ttttgttcat tctttacctt tttttctttt ctttctttct tttttgtaca
4261 tactgtaagg ttggtttgta aattattcta cggaggcaaa aagggaaaat aaaaacttgc
4321 ccttccctgg ctgacccagt cgggaaggta gggaaggagg tctcccgttg ggagagtctc
4381 tgttcctgct gtattataca aactgtacca tagtcctggg aaaagggtgg actcaccgct
4441 gttgttttat gggaagtcgt gtcatcctag gggttggggc tgggcagagc ctgtcccctc
4501 cccccttctc caggagccag ggggtgactg gagagacaga cccaccccca agcagggctc
4561 ctctccccag ggtgagcaca ggacctctgt aagctgcttg tgtattgtcc actttgacga
4621 tcagtcattc ggtccgttga tcaataatcc ttcgatcttg tctccaatta aaccgaggct
4681 ttcaccgata aaaaaaaaaa aaaa
```

[0949] An antisense nucleic acid molecule can be complementary to all or part of a non-coding region of the coding strand of a nucleotide sequence encoding a PDE4 protein. Non-coding regions (5′ and 3′ untranslated regions) are the 5′ and 3′ sequences that flank the coding region in a gene and are not translated into amino acids.

[0950] Based upon the sequences disclosed herein, one of skill in the art can easily choose and synthesize any of a number of appropriate antisense nucleic acids to target a nucleic acid encoding a PDE4 described herein. Antisense nucleic acids targeting a nucleic acid encoding a PDE4 can be designed using the software available at the Integrated DNA Technologies website.

[0951] An antisense nucleic acid can be, for example, about 5, 10, 15, 20, 25, 30, 35, 40, 45, or 50 nucleotides or more in length. An antisense oligonucleotide can be constructed using chemical synthesis and enzymatic ligation reactions using procedures known in the art. For example, an antisense nucleic acid can be chemically synthesized using naturally occurring nucleotides or variously modified nucleotides designed to increase the biological stability of the molecules or to increase the physical stability of the duplex formed between the antisense and sense nucleic acids, e.g., phosphorothioate derivatives and acridine substituted nucleotides can be used.

[0952] Examples of modified nucleotides which can be used to generate an antisense nucleic acid include 5-fluorouracil, 5-bromouracil, 5-chlorouracil, 5-iodouracil, hypoxanthine, xanthine, 4-acetylcytosine, 5-(carboxyhydroxylmethyl) uracil, 5-carboxymethylaminomethyl-2-thiouridine, 5-carboxymethylaminomethyluracil, dihydrouracil, beta-D-galactosylqueosine, inosine, N6-isopentenyladenine, 1-methylguanine, 1-methylinosine, 2,2-dimethylguanine, 2-methyladenine, 2-methylguanine, 3-methylcytosine, 5-methylcytosine, N6-adenine, 7-methylguanine, 5-methylaminomethyluracil, 5-methoxyaminomethyl-2-thiouracil, beta-D-mannosylqueosine, 5′-methoxycarboxymethyluracil, 5-methoxyuracil, 2-methylthio-N6-isopentenyladenine, uracil-5-oxyacetic acid (v), wybutoxosine, pseudouracil, queosine, 2-thiocytosine, 5-methyl-2-thiouracil, 2-thiouracil, 4-thiouracil, 5-methyluracil, uracil-5-oxyacetic acid methylester, uracil-5-oxyacetic acid (v), 5-methyl-2-thiouracil, 3-(3-amino-3-N-2-carboxypropyl) uracil, (acp3)w, and 2,6-diaminopurine. Alternatively, the antisense nucleic acid can be produced biologically using an expression vector into which a nucleic acid has been subcloned in an antisense orientation (i.e., RNA transcribed from the inserted nucleic acid will be of an antisense orientation to a target nucleic acid of interest).

[0953] The antisense nucleic acid molecules described herein can be prepared in vitro and administered to a mammal, e.g., a human. Alternatively, they can be generated in situ such that they hybridize with or bind to cellular mRNA and/or genomic DNA encoding a PDE4 protein to thereby inhibit expression, e.g., by inhibiting transcription and/or translation. The hybridization can be by conventional nucleotide complementarities to form a stable duplex, or, for example, in the case of an antisense nucleic acid molecule that binds to DNA duplexes, through specific interactions in the major groove of the double helix. The antisense nucleic acid molecules can be delivered to a mammalian cell using a vector (e.g., a lentivirus, a retrovirus, or an adenovirus vector).

[0954] An antisense nucleic acid can be an α-anomeric nucleic acid molecule. An α-anomeric nucleic acid molecule forms specific double-stranded hybrids with complementary RNA in which, contrary to the usual, β-units, the strands run parallel to each other (Gaultier et al., Nucleic Acids Res. 15:6625-6641, 1987). The antisense nucleic acid can also comprise a 2′-O-methylribonucleotide (Inoue et al., Nucleic Acids Res. 15:6131-6148, 1987) or a chimeric RNA-DNA analog (Inoue et al., FEBS Lett. 215:327-330, 1987).

[0955] Another example of an inhibitory nucleic acid is a ribozyme that has specificity for a nucleic acid encoding a PDE4 protein (e.g., specificity for a PDE4 mRNA, e.g., specificity for SEQ ID NO: 1, 2, 3, 4, or 5). Ribozymes are catalytic RNA molecules with ribonuclease activity that are capable of cleaving a single-stranded nucleic acid, such as an mRNA, to which they have a complementary region. Thus, ribozymes (e.g., hammerhead ribozymes (described in Haselhoff and Gerlach, Nature 334:585-591, 1988)) can be used to catalytically cleave mRNA transcripts to thereby inhibit translation of the protein encoded by the mRNA. A ribozyme having specificity for a PDE4 mRNA can be designed based upon the nucleotide sequence of any of the PDE4 mRNA sequences disclosed herein. For example, a derivative of a Tetrahymena L-19 IVS RNA can be constructed in which the nucleotide sequence of the active site is complementary to the nucleotide sequence to be cleaved in a PDE4 mRNA (see, e.g., U.S. Pat. Nos. 4,987,071 and 5,116,742). Alternatively, a PDE4 mRNA can be used to select a catalytic RNA having a specific ribonuclease activity from a pool of RNA molecules. See, e.g., Bartel et al., Science 261:1411-1418, 1993.

[0956] An inhibitor nucleic acid can also be a nucleic acid molecule that forms triple helical structures. For example, expression of a PDE4 polypeptide can be inhibited by targeting nucleotide sequences complementary to the regulatory region of the gene encoding the PDE4 polypeptide (e.g., the promoter and/or enhancer, e.g., a sequence that is at least 1 kb, 2 kb, 3 kb, 4 kb, or 5 kb upstream of the transcription initiation start state) to form triple helical structures that prevent transcription of the gene in target cells. See generally Helene, Anticancer Drug Des. 6(6):569-84, 1991; Helene, Ann. N.Y. Acad. Sci. 660:27-36, 1992; and Maher, Bioassays 14(12):807-15, 1992.

[0957] In various embodiments, inhibitory nucleic acids can be modified at the base moiety, sugar moiety, or phosphate backbone to improve, e.g., the stability, hybridization, or solubility of the molecule. For example, the deoxyribose phosphate backbone of the nucleic acids can be modified to generate peptide nucleic acids (see, e.g., Hyrup et al., Bioorganic Medicinal Chem. 4(1):5-23, 1996). Peptide nucleic acids (PNAs) are nucleic acid mimics, e.g., DNA mimics, in which the deoxyribose phosphate backbone is replaced by a pseudopeptide backbone and only the four natural nucleobases are retained. The neutral backbone of PNAs allows for specific hybridization to DNA and RNA under conditions of low ionic strength. The synthesis of PNA oligomers can be performed using standard solid phase peptide synthesis protocols (see, e.g., Perry-O'Keefe et al., Proc. Nat. Acad. Sci. U.S.A. 93:14670-675, 1996). PNAs can be used as antisense or antigene agents for sequence-specific modulation of gene expression by, e.g., inducing transcription or translation arrest or inhibiting replication.

[0958] PNAs can be modified, e.g., to enhance their stability or cellular uptake, by attaching lipophilic or other helper groups to PNA, by the formation of PNA-DNA chimeras, or by the use of liposomes or other techniques of drug delivery known in the art. For example, PNA-DNA chimeras can be generated which may combine the advantageous properties of PNA and DNA. Such chimeras allow DNA recognition enzymes, e.g., RNAse H and DNA polymerases, to interact with the DNA portion while the PNA portion would provide high binding affinity and specificity. PNA-DNA chimeras can be linked using linkers of appropriate lengths selected in terms of base stacking, number of bonds between the nucleobases, and orientation.

[0959] The synthesis of PNA-DNA chimeras can be performed as described in Finn et al., Nucleic Acids Res. 24:3357-63, 1996. For example, a DNA chain can be synthesized on a solid support using standard phosphoramidite coupling chemistry and modified nucleoside analogs. Compounds such as 5′-(4-methoxytrityl)amino-5′-deoxy-thymidine phosphoramidite can be used as a link between the PNA and the 5′ end of DNA (Mag et al., Nucleic Acids Res. 17:5973-88, 1989). PNA monomers are then coupled in a stepwise manner to produce a chimeric molecule with a 5′ PNA segment and a 3′ DNA segment (Finn et al., Nucleic Acids Res. 24:3357-63, 1996). Alternatively, chimeric molecules can be synthesized with a 5′ DNA segment and a 3′ PNA segment (Peterser et al., Bioorganic Med. Chem. Lett. 5:1119-11124, 1975).

[0960] In some embodiments, the inhibitory nucleic acids can include other appended groups such as peptides, or agents facilitating transport across the cell membrane (see, Letsinger et al., Proc. Nat. Acad. Sci. U.S.A. 86:6553-6556, 1989; Lemaitre et al., Proc. Nat. Acad. Sci. U.S.A. 84:648-652, 1989; and WO 88/09810). In addition, the inhibitory nucleic acids can be modified with hybridization-triggered cleavage agents (see, e.g., Krol et al., Bio/Techniques 6:958-976, 1988) or intercalating agents (see, e.g., Zon, Pharm. Res. 5:539-549, 1988). To this end, the oligonucleotide may be conjugated to another molecule, e.g., a peptide, hybridization triggered cross-linking agent, transport agent, hybridization-triggered cleavage agent, etc.

[0961] Another means by which expression of a PDE4 mRNA can be decreased in a mammalian cell is by RNA interference (RNAi). RNAi is a process in which mRNA is degraded in host cells. To inhibit an mRNA, double-stranded RNA (dsRNA) corresponding to a portion of the gene to be silenced (e.g., a gene encoding a PDE4 polypeptide) is introduced into a mammalian cell. The dsRNA is digested into 21-23 nucleotide-long duplexes called short interfering RNAs (or siRNAs), which bind to a nuclease complex to form what is known as the RNA-induced silencing complex (or RISC). The RISC targets the homologous transcript by base pairing interactions between one of the siRNA strands and the endogenous mRNA. It then cleaves the mRNA about 12 nucleotides from the 3′ terminus of the siRNA (see Sharp et al., Genes Dev. 15:485-490, 2001, and Hammond et al., Nature Rev. Gen. 2:110-119, 2001).

[0962] RNA-mediated gene silencing can be induced in a mammalian cell in many ways, e.g., by enforcing endogenous expression of RNA hairpins (see, Paddison et al., Proc. Nat. Acad. Sci. U.S.A. 99:1443-1448, 2002) or, as noted above, by transfection of small (21-23 nt) dsRNA (reviewed in Caplen, Trends Biotech. 20:49-51, 2002). Methods for modulating gene expression with RNAi are described, e.g., in U.S. Pat. No. 6,506,559 and US 2003/0056235, which are hereby incorporated by reference.

[0963] Standard molecular biology techniques can be used to generate siRNAs. Short interfering RNAs can be chemically synthesized, recombinantly produced, e.g., by expressing RNA from a template DNA, such as a plasmid, or obtained from commercial vendors, such as Dharmacon. The RNA used to mediate RNAi can include synthetic or modified nucleotides, such as phosphorothioate nucleotides. Methods of transfecting cells with siRNA or with plasmids engineered to make siRNA are routine in the art.

[0964] The siRNA molecules used to decrease expression of a PDE4 mRNA can vary in a number of ways. For example, they can include a 3′ hydroxyl group and strands of 21, 22, or 23 consecutive nucleotides. They can be blunt ended or include an overhanging end at either the 3′ end, the 5′ end, or both ends. For example, at least one strand of the RNA molecule can have a 3′ overhang from about 1 to about 6 nucleotides (e.g., 1-5, 1-3, 2-4 or 3-5 nucleotides (whether pyrimidine or purine nucleotides) in length. Where both strands include an overhang, the length of the overhangs may be the same or different for each strand.

[0965] To further enhance the stability of the RNA duplexes, the 3′ overhangs can be stabilized against degradation (by, e.g., including purine nucleotides, such as adenosine or guanosine nucleotides or replacing pyrimidine nucleotides by modified analogues (e.g., substitution of uridine 2-nucleotide 3′ overhangs by 2′-deoxythymidine is tolerated and does not affect the efficiency of RNAi). Any siRNA can be used in the methods of decreasing PDE4 mRNA, provided it has sufficient homology to the target of interest (e.g., a sequence present in any one of SEQ ID NOs: 1-5, e.g., a target sequence encompassing the translation start site or the first exon of the mRNA). There is no upper limit on the length of the siRNA that can be used (e.g., the siRNA can range from about 21 base pairs of the gene to the full length of the gene or more (e.g., about 20 to about 30 base pairs, about 50 to about 60 base pairs, about 60 to about 70 base pairs, about 70 to about 80 base pairs, about 80 to about 90 base pairs, or about 90 to about 100 base pairs).

[0966] Non-limiting examples of siRNAs targeting PDE4 are described in Takakura et al., PLosOne 10(12):e0142981, 2015; Watanabe et al., Cell Signal 27(7):1517-1524, 2015; Suzuki et al., PLos One 11(7):e0158967, 2016; Kai et al., Mol. Ther. Nucl. Acids 6: 163-172, 2017). See, e.g., Cheng et al. Exp Ther Med 12(4): 2257-2264, 2016; Peter et al., J Immunol 178)8): 4820-4831; and Lynch et al. J Biolog Chem 280: 33178-33189. Additional examples of PDE4 inhibitory nucleic acids are described in U.S. Patent Application Publication Nos. 2010/0216703 and 2014/0171487, which are incorporated by reference in its entirety.

[0967] In some embodiments, a therapeutically effective amount of an inhibitory nucleic acid targeting PDE4 can be administered to a subject (e.g., a human subject) in need thereof.

[0968] In some embodiments, the inhibitory nucleic acid can be about 10 nucleotides to about 40 nucleotides (e.g., about 10 to about 30 nucleotides, about 10 to about 25 nucleotides, about 10 to about 20 nucleotides, about 10 to about 15 nucleotides, 10 nucleotides, 11 nucleotides, 12 nucleotides, 13 nucleotides, 14 nucleotides, 15 nucleotides, 16 nucleotides, 17 nucleotides, 18 nucleotides, 19 nucleotides, 20 nucleotides, 21 nucleotides, 22 nucleotides, 23 nucleotides, 24 nucleotides, 25 nucleotides, 26 nucleotides, 27 nucleotides, 28 nucleotides, 29 nucleotides, 30 nucleotides, 31 nucleotides, 32 nucleotides, 33 nucleotides, 34 nucleotides, 35 nucleotides, 36 nucleotides, 37 nucleotides, 38 nucleotides, 39 nucleotides, or 40 nucleotides) in length. One skilled in the art will appreciate that inhibitory nucleic acids may comprise at least one modified nucleic acid at either the 5′ or 3′end of DNA or RNA.

[0969] Any of the inhibitor nucleic acids described herein can be formulated for administration to the gastrointestinal tract. See, e.g., the formulation methods described in US 2016/0090598 and Schoellhammer et al., Gastroenterology, doi: 10.1053/j.gastro.2017.01.002, 2017.

[0970] In some embodiments, the inhibitory nucleic acid can be formulated in a nanoparticle (e.g., a nanoparticle including one or more synthetic polymers, e.g., Patil et al., Pharmaceutical Nanotechnol. 367:195-203, 2009). In some embodiments, the nanoparticle can be a mucoadhesive particle (e.g., nanoparticles having a positively-charged exterior surface) (Andersen et al., Methods Mol. Biol. 555:77-86, 2009). In some embodiments, the nanoparticle can have a neutrally-charged exterior surface.

[0971] In some embodiments, the inhibitory nucleic acid can be formulated, e.g., as a liposome (Buyens et al., J. Control Release 158(3): 362-370, 2012), a micelle (e.g., a mixed micelle) (Tangsangasaksri et al., BioMacromolecules 17:246-255, 2016), a microemulsion (WO 11/004395), a nanoemulsion, or a solid lipid nanoparticle (Sahay et al., Nature Biotechnol. 31:653-658, 2013; Lin et al., Nanomedicine 9(1):105-120, 2014).

### Additional Examples of Immune Modulators

[0972] An immune modulator as described herein can be an antibody or antigen-binding fragment, a nucleic acid (e.g., inhibitory nucleic acid), a small molecule, and a live biotherapeutic, such as a probiotic. In some embodiments, the immune modulator can be a drug or therapeutic used for the treatment of inflammatory bowel disease (IBD), for example, Crohn's Disease or Ulcerative Colitic (UC). Non-limiting immune modulators that useful for treating or preventing inflammatory bowel disease include substances that suppress cytokine production, down-regulate or suppress self-antigen expression, or mask MHC antigens. Non-limiting examples of immune modulators include, without limitation: CHST15 inhibitors (e.g., STNM01); IL-6 receptor inhibitora (e.g., tocilizumab); IL-12/IL-23 inhibitors (e.g., ustekinumab and brazikumab); integrin inhibitors (e.g., vedolizumab and natalizumab); JAK inhibitors (e.g., tofacitinib); SMAD7 inhibitors (e.g., Mongersen); IL-13 inhibitors; IL-1 receptor inhibitors; TLR agonists (e.g., Kappaproct); stem cells (e.g., Cx601); 2-amino-6-aryl-5-substituted pyrimidines (see U.S. Pat. No. 4,665,077); nonsteroidal anti-inflammatory drugs (NSAIDs); ganciclovir; tacrolimus; glucocorticoids such as Cortisol or aldosterone; anti-inflammatory agents such as a cyclooxygenase inhibitor; a 5-lipoxygenase inhibitor; or a leukotriene receptor antagonist; purine antagonists such as azathioprine or mycophenolate mofetil (MMF); alkylating agents such as cyclophosphamide; bromocryptine; danazol; dapsone; glutaraldehyde (which masks the MHC antigens, as described in U.S. Pat. No. 4,120,649); anti-idiotypic antibodies for MHC antigens and MHC fragments; cyclosporine; 6-mercaptopurine; steroids such as corticosteroids or glucocorticosteroids or glucocorticoid analogs, e.g., prednisone, methylprednisolone, including SOLU-MEDROL®, methylprednisolone sodium succinate, and dexamethasone; dihydrofolate reductase inhibitors such as methotrexate (oral or subcutaneous); anti-malarial agents such as chloroquine and hydroxychloroquine; sulfasalazine; leflunomide; cytokine or cytokine receptor antibodies or antagonists including anti-interferon-alpha, -beta, or -gamma antibodies, anti-tumor necrosis factor(TNF)-alpha antibodies (infliximab (REMICADE®) or adalimumab), anti-TNF-alpha immunoadhesin (etanercept), anti-TNF-beta antibodies, antiinterleukin-2 (IL-2) antibodies and anti-IL-2 receptor antibodies, and anti-interleukin-6 (IL-6) receptor antibodies and antagonists; anti-LFA-1 antibodies, including anti-CD 1 la and anti-CD 18 antibodies; anti-L3T4 antibodies; heterologous anti-lymphocyte globulin; pan-T antibodies, anti-CD3 or anti-CD4/CD4a antibodies; soluble peptide containing a LFA-3 binding domain (WO 90/08187 published Jul. 26, 1990); streptokinase; transforming growth factor-beta (TGF-beta); streptodomase; RNA or DNA from the host; FK506; RS-61443; chlorambucil; deoxyspergualin; rapamycin; T-cell receptor (Cohen et al, U.S. Pat. No. 5,114,721); T-cell receptor fragments (Offner et al, Science, 251: 430-432 (1991); WO 90/11294; Ianeway, Nature, 341: 482 (1989); and WO 91/01133); BAFF antagonists such as BAFF or BR3 antibodies or immunoadhesins and zTNF4 antagonists (for review, see Mackay and Mackay, Trends Immunol, 23: 113-5 (2002) and see also definition below); 10 biologic agents that interfere with T cell helper signals, such as anti-CD40 receptor or anti-CD40 ligand (CD 154), including blocking antibodies to CD40-CD40 ligand. (e.g., Durie et al, Science, 261 1328-30 (1993); Mohan et al, J. Immunol, 154: 1470-80 (1995)) and CTLA4-Ig (Finck et al, Science, 265: 1225-7 (1994)); and T-cell receptor antibodies (EP 340,109) such as T10B9. Non-limiting examples of agents also include the following: budenoside; epidermal growth factor; aminosalicylates; metronidazole; mesalamine; olsalazine; balsalazide; antioxidants; thromboxane inhibitors; IL-I receptor antagonists; anti-IL-I monoclonal antibodies; growth factors; elastase inhibitors; pyridinylimidazole compounds; TNF antagonists; IL-4, IL-10, IL-13 and/or TGFβ cytokines or agonists thereof (e.g., agonist antibodies); IL-11; glucuronide- or dextran-conjugated prodrugs of prednisolone, dexamethasone or budesonide; ICAM-I antisense phosphorothioate oligodeoxynucleotides (ISIS 2302; Isis Pharmaceuticals, Inc.); soluble complement receptor 1 (TPlO; T Cell Sciences, Inc.); slow-release mesalazine; antagonists of platelet activating factor (PAF); ciprofloxacin; and lignocaine.

[0973] Non-limiting examples of immune modulators that are useful for treating ulcerative colitis include sulfasalazine and related salicylate-containing drugs for mild cases and corticosteroid drugs for severe cases. Non-limiting examples of immune modulators that are useful for treating a liver disease or disorder (e.g., liver fibrosis or NASH) include: elafibranor (GFT 505; Genfit Corp.), obeticholic acid (OCA; Intercept Pharmaceuticals, Inc.), cenicriviroc (CVC; Allergan plc), selonsertib (formerly GS-4997; Gilead Sciences, Inc.), an anti-LOXL2 antibody (simtuzumab (formerly GS 6624; Gilead Sciences, Inc.)), GS-9450 (Gilead Sciences, Inc.), GS-9674 (Gilead Sciences, Inc.), GS-0976 (formerly NDI-010976; Gilead Sciences, Inc.), Emricasan (Conatus Pharmaceuticals, Inc.), Arachidyl-amido cholanoic acid (Aramchol™; Galmed Pharmaceuticals Ltd.), AKN-083 (Allergan plc (Akarna Therapeutics Ltd.)), TGFTX4 (Genfit Corp.), TGFTX5 (Genfit Corp.), TGFTX1 (Genfit Corp.), a RoRγ agonist (e.g., LYC-55716; Lycera Corp.), an ileal bile acid transporter (iBAT) inhibitor (e.g., elobixibat, Albireo Pharma, Inc.; GSK2330672, GlaxoSmithKline plc; and A4250; Albireo Pharma, Inc.), stem cells, a CCR2 inhibitor, bardoxolone methyl (Reata Pharmaceuticals, Inc.), a bone morphogenetic protein-7 (BMP-7) mimetic (e.g., THR-123 (see, e.g., Sugimoto et al. (2012) Nature Medicine 18: 396-404)), an anti-TGF-β antibody (e.g., fresolimumab; see also U.S. Pat. Nos. 7,527,791 and 8,383,780, incorporated herein by reference), pirfenidone (Esbriet®, Genentech USA Inc.), an anti-integrin αvβ6 antibody, an anti-connective tissue growth factor (CTGF) antibody (e.g., pamrevlumab; FibroGen Inc.), pentoxifylline, vascular endothelial growth factor (VEGF), a renin angiotensin aldosterone system (RAAS) inhibitor (e.g., a rennin inhibitor (e.g. pepstatin, CGP2928, aliskiren), or an ACE inhibitor (e.g., captopril, zofenopril, enalapril, ramipril, quinapril, perindopril, lisinopril, benazepril, imidapril, fosinopril, and trandolapril)), thrombospondin, a statin, bardoxolone, a PDE5 inhibitor (e.g., sidenafil, vardenafil, and tadalafil), a NADPH oxidase-1 (NOX1) inhibitor (see, e.g., U.S. Publication No. 2011/0178082, incorporated herein by reference), a NADPH oxidase-4 (NOX4) inhibitor (see, e.g., U.S. Publication No. 2014/0323500, incorporated herein by reference), an ETA antagonist (e.g., sitaxentan, ambrisentan, atrasentan, BQ-123, and zibotentan), nintedanib (Boehringer Ingelheim), INT-767 (Intercept Pharmaceuticals, Inc.), VBY-376 (Virobay Inc.), PF-04634817(Pfizer), EXC 001 (Pfizer), GM-CT-01 (Galectin Therapeutics), GCS-100 (La Jolla Pharmaceuticals), hepatocyte growth factor mimetic (Refanalin®; Angion Biomedica), SAR156597 (Sanofi), tralokinumab (AstraZeneca), pomalidomide (Celgene), STX-100 (Biogen IDEC), CC-930 (Celgene), anti-miR-21 (Regulus Therapeutics), PRM-151 (Promedior), BOT191 (BiOrion), Palomid 529 (Paloma Pharamaceuticals), IMD1041 (IMMD, Japan), serelaxin (Novartis), PEG-relaxin (Ambrx and Bristol-Myers Squibb), ANG-4011 (Angion Biomedica), FT011 (Fibrotech Therapeutics), pirfenidone (InterMune), F351 (pirfenidone derivative (GNI Pharma), vitamin E (e.g., tocotrienol (alpha, beta, gamma, and delta) and tocopherol (alpha, beta, gamma, and delta)), pentoxifylline, an insulin sensitizer (e.g., rosiglitazone and pioglitazone), cathepsin B inhibitor R-3020, etanercept and biosimilars thereof, peptides that block the activation of Fas (see, e.g., International Publication No. WO 2005/117940, incorporated herein by reference), caspase inhibitor VX-166, caspase inhibitor Z-VAD-fmk, fasudil, belnacasan (VX-765), and pralnacasan (VX-740).

[0974] Therapeutic agents that may be used for the treatment of the indications herein also include:

[0975] TNF inhibitors: tulinercept, DLX-105 (gel formulation);

[0976] IL-12/Il-23 inhibitors: AK-101;

[0977] IL-6R inhibitors: YSIL6, olokizumab (CDP-6038);

[0978] JAK inhibitors: PF-06700841, PF-06651600;

[0979] live biotherapeutics: Neuregulin 4; NN8555;

[0980] immune modulators: KHK-4083, GSK2618960, Toralizumab:

[0981] chemokines: GSK3050002 (previously known as KANAb071), E-6011, HGS-1025;

[0982] IL-1 inhibitors: K(D)PT;

[0983] IL-10 inhibitors: RG-7880;

[0984] CHST15 inhibitors: SB-012:

[0985] TLR agonists: BL-7040; EN-101; Monarsen.

[0986] In some embodiments, an immune modulator can decrease the activity and/or the level in a mammalian cell of its target receptor, such as TNF, IL-12/IL-23, IL-6R, JAK, a chemokine, IL-1, IL-10, CHST15, or TLR. In some embodiments, a immune modulator can decrease (e.g., by about 1% to about 99%, by about 1% to about 95%, by about 1% to about 90%, by about 1% to about 85%, by about 1% to about 80%, by about 1% to about 75%, by about 1% to about 70%, by about 1% to about 65%, by about 1% to about 60%, by about 1% to about 55%, by about 1% to about 50%, by about 1% to about 45%, by about 1% to about 40%, by about 1% to about 35%, by about 1% to about 30%, by about 1% to about 25%, by about 1% to about 20%, by about 1% to about 20%, by about 1% to about 15%, by about 1% to about 10%, by about 1% to about 5%, by about 5% to about 99%, by about 5% to about 90%, by about 5% to about 85%, by about 5% to about 80%, by about 5% to about 75%, by about 5% to about 70%, by about 5% to about 65%, by about 5% to about 60%, by about 5% to about 55%, by about 5% to about 50%, by about 5% to about 45%, by about 5% to about 40%, by about 5% to about 35%, by about 5% to about 30%, by about 5% to about 25%, by about 5% to about 20%, by about 5% to about 15%, by about 5% to about 10%, by about 10% to about 99%, about 10% to about 95%, about 10% to about 90%, about 10% to about 85%, by about 10% to about 80%, by about 10% to about 75%, by about 10% to about 70%, by about 10% to about 65%, by about 10% to about 60%, by about 10% to about 55%, by about 10% to about 50%, by about 10% to about 45%, by about 10% to about 40%, by about 10% to about 35%, by about 10% to about 30%, by about 10% to about 25%, by about 10% to about 20%, by about 10% to about 15%, by about 15% to about 99%, by about 15% to about 95%, by about 15% to about 90%, by about 15% to about 85%, by about 15% to about 80%, by about 15% to about 75%, by about 15% to about 70%, by about 15% to about 65%, by about 15% to about 60%, by about 15% to about 55%, by about 15% to about 50%, by about 15% to about 45%, by about 15% to about 40%, by about 15% to about 35%, by about 15% to about 30%, by about 15% to about 25%, by about 15% to about 20%, by about 20% to about 99%, by about 20% to about 95%, by about 20% to about 90%, by about 20% to about 85%, by about 20% to about 80%, by about 20% to about 75%, by about 20% to about 70%, by about 20% to about 65%, by about 20% to about 60%, by about 20% to about 55%, by about 20% to about 50%, by about 20% to about 45%, by about 20% to about 40%, by about 20% to about 35%, by about 20% to about 30%, by about 20% to about 25%, by about 25% to about 99%, about 25% to about 95%, by about 25% to about 90%, by about 25% to about 85%, by about 25% to about 80%, by about 25% to about 75%, by about 25% to about 70%, by about 25% to about 65%, by about 25% to about 60%, by about 25% to about 55%, by about 25% to about 50%, by about 25% to about 45%, by about 25% to about 40%, by about 25% to about 35%, by about 25% to about 30%, by about 30% to about 99%, by about 30% to about 95%, by about 30% to about 90%, by about 30% to about 85%, by about 30% to about 80%, by about 30% to about 75%, by about 30% to about 70%, by about 30% to about 65%, by about 30% to about 60%, by about 30% to about 55%, by about 30% to about 50%, by about 30% to about 45%, by about 30% to about 40%, by about 30% to about 35%, by about 35% to about 99%, by about 35% to about 95%, by about 35% to about 90%, by about 35% to about 85%, by about 35% to about 80%, by about 35% to about 75%, by about 35% to about 70%, by about 35% to about 65%, by about 35% to about 60%, by about 35% to about 55%, by about 35% to about 50%, by about 35% to about 45%, by about 35% to about 40%, by about 40% to about 99%, by about 40% to about 95%, by about 40% to about 90%, by about 40% to about 85%, by about 40% to about 80%, by about 40% to about 75%, by about 40% to about 70%, by about 40% to about 65%, by about 40% to about 60%, by about 40% to about 55%, by about 40% to about 50%, by about 40% to about 45%, by about 45% to about 99%, by about 45% to about 95%, by about 45% to about 90%, by about 45% to about 85%, by about 45% to about 80%, by about 45% to about 75%, by about 45% to about 70%, by about 45% to about 65%, by about 45% to about 60%, by about 45% to about 55%, by about 45% to about 50%, by about 50% to about 99%, by about 50% to about 95%, by about 50% to about 90%, by about 50% to about 85%, by about 50% to about 80%, by about 50% to about 75%, by about 50% to about 70%, by about 50% to about 65%, by about 50% to about 60%, by about 50% to about 55%, by about 55% to about 99%, by about 55% to about 95%, by about 55% to about 90%, by about 55% to about 85%, by about 55% to about 80%, by about 55% to about 75%, by about 55% to about 70%, by about 55% to about 65%, by about 55% to about 60%, by about 60% to about 99%, by about 60% to about 95%, by about 60% to about 90%, by about 60% to about 85%, by about 60% to about 80%, by about 60% to about 75%, by about 60% to about 70%, by about 60% to about 65%, by about 65% to about 99%, by about 65% to about 95%, by about 65% to about 90%, by about 65% to about 85%, by about 65% to about 80%, by about 65% to about 75%, by about 65% to about 70%, by about 70% to about 99%, by about 70% to about 95%, by about 70% to about 90%, by about 70% to about 85%, by about 70% to about 80%, by about 70% to about 75%, by about 75% to about 99%, by about 75% to about 95%, by about 75% to about 90%, by about 75% to about 85%, by about 75% to about 80%, by about 80% to about 99%, by about 80% to about 95%, by about 80% to about 90%, by about 80% to about 85%, by about 85% to about 99%, by about 85% to about 95%, by about 85% to about 90%, by about 90% to about 99%, by about 90% to about 95%, or by about 95% to about 99%) in the level of PDE4 protein in a mammalian cell contacted with the agent, e.g., as compared to the level of PDE4 protein in the same mammalian cell not contacted with the agent.

[0987] In some embodiments, a immune modulator can inhibit PDE4 activity with an IC₅₀ of about 1 pM to about 100 μM, about 1 pM to about 95 μM, about 1 pM to about 90 μM, about 1 pM to about 85 μM, about 1 pM to about 80 μM, about 1 pM to about 75 μM, about 1 pM to about 70 M, about 1 pM to about 65 μM, about 1 pM to about 60 μM, about 1 pM to about 55 μM, about 1 pM to about 50 μM, about 1 pM to about 45 μM, about 1 pM to about 40 μM, about 1 pM to about 35 μM, about 1 pM to about 30 μM, about 1 pM to about 25 μM, about 1 pM to about 20 μM, about 1 pM to about 15 μM, about 1 pM to about 10 μM, about 1 pM to about 5 μM, about 1 pM to about 1 μM, about 1 pM to about 900 nM, about 1 pM to about 800 nM, about 1 pM to about 700 nM, about 1 pM to about 600 nM, about 1 pM to about 500 nM, about 1 pM to about 400 nM, about 1 pM to about 300 nM, about 1 pM to about 200 nM, about 1 pM to about 100 nM, about 1 pM to about 50 nM, about 1 pM to about 1 nM, about 1 pM to about 800 pM, about 1 pM to about 600 pM, about 1 pM to about 400 pM, about 1 pM to about 200 pM, about 200 pM to about 100 pM, about 200 pM to about 95 μM, about 200 pM to about 90 μM, about 200 pM to about 85 μM, about 200 pM to about 80 μM, about 200 pM to about 75 μM, about 200 pM to about 70 μM, about 200 pM to about 65 μM, about 200 pM to about 60 μM, about 200 pM to about 55 μM, about 200 pM to about 50 μM, about 200 pM to about 45 μM, about 200 pM to about 40 μM, about 200 pM to about 35 μM, about 200 pM to about 30 μM, about 200 pM to about 25 μM, about 200 pM to about 20 μM, about 200 pM to about 15 μM, about 200 pM to about 10 μM, about 200 pM to about 5 μM, about 200 pM to about 1 μM, about 200 pM to about 900 nM, about 200 pM to about 800 nM, about 200 pM to about 700 nM, about 200 pM to about 600 nM, about 200 pM to about 500 nM, about 200 pM to about 400 nM, about 200 pM to about 300 nM, about 200 pM to about 200 nM, about 200 pM to about 100 nM, about 200 pM to about 50 nM, about 200 pM to about 1 nM, about 200 pM to about 800 pM, about 200 pM to about 600 pM, about 200 pM to about 400 pM, about 400 pM to about 100 μM, about 400 pM to about 95 μM, about 400 pM to about 90 μM, about 400 pM to about 85 μM, about 400 pM to about 80 μM, about 400 pM to about 75 μM, about 400 pM to about 70 μM, about 400 pM to about 65 μM, about 400 pM to about 60 μM, about 400 pM to about 55 μM, about 400 pM to about 50 μM, about 400 pM to about 45 μM, about 400 pM to about 40 μM, about 400 pM to about 35 μM, about 400 pM to about 30 μM, about 400 pM to about 25 μM, about 400 pM to about 20 μM, about 400 pM to about 15 μM, about 400 pM to about 10 μM, about 400 pM to about 5 μM, about 400 pM to about 1 μM, about 400 pM to about 900 nM, about 400 pM to about 800 nM, about 400 pM to about 700 nM, about 400 pM to about 600 nM, about 400 pM to about 500 nM, about 400 pM to about 400 nM, about 400 pM to about 300 nM, about 400 pM to about 200 nM, about 400 pM to about 100 nM, about 400 pM to about 50 nM, about 400 pM to about 1 nM, about 400 pM to about 800 pM, 400 pM to about 600 pM, about 600 pM to about 100 μM, about 600 pM to about 95 μM, about 600 pM to about 90 μM, about 600 pM to about 85 μM, about 600 pM to about 80 μM, about 600 pM to about 75 μM, about 600 pM to about 70 μM, about 600 pM to about 65 μM, about 600 pM to about 60 μM, about 600 pM to about 55 μM, about 600 pM to about 50 μM, about 600 pM to about 45 μM, about 600 pM to about 40 μM, about 600 pM to about 35 μM, about 600 pM to about 30 μM, about 600 pM to about 25 μM, about 600 pM to about 20 μM, about 600 pM to about 15 μM, about 600 pM to about 10 μM, about 600 pM to about 5 μM, about 600 pM to about 1 μM, about 600 pM to about 900 nM, about 600 pM to about 800 nM, about 600 pM to about 700 nM, about 600 pM to about 600 nM, about 600 pM to about 500 nM, about 600 pM to about 400 nM, about 600 pM to about 300 nM, about 600 pM to about 200 nM, about 600 pM to about 100 nM, about 600 pM to about 50 nM, about 600 pM to about 1 nM, about 600 pM to about 800 pM, about 800 pM to about 100 μM, about 800 pM to about 95 μM, about 800 pM to about 90 μM, about 800 pM to about 85 μM, about 800 pM to about 80 μM, about 800 pM to about 75 μM, about 800 pM to about 70 μM, about 800 pM to about 65 μM, about 800 pM to about 60 μM, about 800 pM to about 55 μM, about 800 pM to about 50 μM, about 800 pM to about 45 μM, about 800 pM to about 40 μM, about 800 pM to about 35 μM, about 800 pM to about 30 μM, about 800 pM to about 25 μM, about 800 pM to about 20 μM, about 800 pM to about 15 μM, about 800 pM to about 10 μM, about 800 pM to about 5 μM, about 800 pM to about 1 μM, about 800 pM to about 900 nM, about 800 pM to about 800 nM, about 800 pM to about 700 nM, about 800 pM to about 600 nM, about 800 pM to about 500 nM, about 800 pM to about 400 nM, about 800 pM to about 300 nM, about 800 pM to about 200 nM, about 800 pM to about 100 nM, about 800 pM to about 50 nM, about 800 pM to about 1 nM, about 1 nM to about 100 μM, about 1 nM to about 95 μM, about 1 nM to about 90 μM, about 1 nM to about 85 μM, about 1 nM to about 80 μM, about 1 nM to about 75 μM, about 1 nM to about 70 μM, about 1 nM to about 65 μM, about 1 nM to about 60 μM, about 1 nM to about 55 μM, about 1 nM to about 50 μM, about 1 nM to about 45 μM, about 1 nM to about 40 μM, about 1 nM to about 35 μM, about 1 nM to about 30 μM, about 1 nM to about 25 μM, about 1 nM to about 20 μM, about 1 nM to about 15 μM, about 1 nM to about 10 μM, about 1 nM to about 5 μM, about 1 nM to about 1 μM, about 1 nM to about 900 nM, about 1 nM to about 800 nM, about 1 nM to about 700 nM, about 1 nM to about 600 nM, about 1 nM to about 500 nM, about 1 nM to about 400 nM, about 1 nM to about 300 nM, about 1 nM to about 200 nM, about 1 nM to about 100 nM, about 1 nM to about 50 nM, about 50 nM to about 100 μM, about 50 nM to about 95 μM, about 50 nM to about 90 μM, about 50 nM to about 85 μM, about 50 nM to about 80 μM, about 50 nM to about 75 μM, about 50 nM to about 70 μM, about 50 nM to about 65 μM, about 50 nM to about 60 μM, about 50 nM to about 55 μM, about 50 nM to about 50 μM, about 50 nM to about 45 μM, about 50 nM to about 40 μM, about 50 nM to about 35 μM, about 50 nM to about 30 μM, about 50 nM to about 25 μM, about 50 nM to about 20 μM, about 50 nM to about 15 μM, about 50 nM to about 10 μM, about 50 nM to about 5 μM, about 50 nM to about 1 μM, about 50 nM to about 900 nM, about 50 nM to about 800 nM, about 50 nM to about 700 nM, about 50 nM to about 600 nM, about 50 nM to about 500 nM, about 50 nM to about 400 nM, about 50 nM to about 300 nM, about 50 nM to about 200 nM, about 50 nM to about 100 nM, about 100 nM to about 100 μM, about 100 nM to about 95 μM, about 100 nM to about 90 μM, about 100 nM to about 85 μM, about 100 nM to about 80 μM, about 100 nM to about 75 μM, about 100 nM to about 70 μM, about 100 nM to about 65 μM, about 100 nM to about 60 μM, about 100 nM to about 55 μM, about 100 nM to about 50 μM, about 100 nM to about 45 μM, about 100 nM to about 40 μM, about 100 nM to about 35 μM, about 100 nM to about 30 μM, about 100 nM to about 25 μM, about 100 nM to about 20 μM, about 100 nM to about 15 μM, about 100 nM to about 10 μM, about 100 nM to about 5 μM, about 100 nM to about 1 μM, about 100 nM to about 900 nM, about 100 nM to about 800 nM, about 100 nM to about 700 nM, about 100 nM to about 600 nM, about 100 nM to about 500 nM, about 100 nM to about 400 nM, about 100 nM to about 300 nM, about 100 nM to about 200 nM, about 200 nM to about 100 μM, about 200 nM to about 95 μM, about 200 nM to about 90 μM, about 200 nM to about 85 μM, about 200 nM to about 80 μM, about 200 nM to about 75 μM, about 200 nM to about 70 μM, about 200 nM to about 65 μM, about 200 nM to about 60 μM, about 200 nM to about 55 μM, about 200 nM to about 50 μM, about 200 nM to about 45 μM, about 200 nM to about 40 μM, about 200 nM to about 35 μM, about 200 nM to about 30 μM, about 200 nM to about 25 μM, about 200 nM to about 20 μM, about 200 nM to about 15 μM, about 200 nM to about 10 μM, about 200 nM to about 5 μM, about 200 nM to about 1 μM, about 200 nM to about 900 nM, about 200 nM to about 800 nM, about 200 nM to about 700 nM, about 200 nM to about 600 nM, about 200 nM to about 500 nM, about 200 nM to about 400 nM, about 200 nM to about 300 nM, about 300 nM to about 100 μM, about 300 nM to about 95 μM, about 300 nM to about 90 μM, about 300 nM to about 85 μM, about 300 nM to about 80 μM, about 300 nM to about 75 μM, about 300 nM to about 70 μM, about 300 nM to about 65 μM, about 300 nM to about 60 μM, about 300 nM to about 55 μM, about 300 nM to about 50 μM, about 300 nM to about 45 μM, about 300 nM to about 40 μM, about 300 nM to about 35 μM, about 300 nM to about 30 μM, about 300 nM to about 25 μM, about 300 nM to about 20 μM, about 300 nM to about 15 μM, about 300 nM to about 10 μM, about 300 nM to about 5 μM, about 300 nM to about 1 μM, about 300 nM to about 900 nM, about 300 nM to about 800 nM, about 300 nM to about 700 nM, about 300 nM to about 600 nM, about 300 nM to about 500 nM, about 300 nM to about 400 nM, about 400 nM to about 100 μM, about 400 nM to about 95 μM, about 400 nM to about 90 M, about 400 nM to about 85 μM, about 400 nM to about 80 μM, about 400 nM to about 75 μM, about 400 nM to about 70 μM, about 400 nM to about 65 μM, about 400 nM to about 60 M, about 400 nM to about 55 μM, about 400 nM to about 50 μM, about 400 nM to about 45 μM, about 400 nM to about 40 μM, about 400 nM to about 35 μM, about 400 nM to about 30 μM, about 400 nM to about 25 μM, about 400 nM to about 20 μM, about 400 nM to about 15 μM, about 400 nM to about 10 μM, about 400 nM to about 5 μM, about 400 nM to about 1 μM, about 400 nM to about 900 nM, about 400 nM to about 800 nM, about 400 nM to about 700 nM, about 400 nM to about 600 nM, about 400 nM to about 500 nM, about 500 nM to about 100 μM, about 500 nM to about 95 μM, about 500 nM to about 90 μM, about 500 nM to about 85 μM, about 500 nM to about 80 μM, about 500 nM to about 75 μM, about 500 nM to about 70 μM, about 500 nM to about 65 μM, about 500 nM to about 60 μM, about 500 nM to about 55 μM, about 500 nM to about 50 μM, about 500 nM to about 45 μM, about 500 nM to about 40 μM, about 500 nM to about 35 μM, about 500 nM to about 30 μM, about 500 nM to about 25 μM, about 500 nM to about 20 μM, about 500 nM to about 15 μM, about 500 nM to about 10 μM, about 500 nM to about 5 μM, about 500 nM to about 1 μM, about 500 nM to about 900 nM, about 500 nM to about 800 nM, about 500 nM to about 700 nM, about 500 nM to about 600 nM, about 600 nM to about 100 μM, about 600 nM to about 95 μM, about 600 nM to about 90 μM, about 600 nM to about 85 μM, about 600 nM to about 80 μM, about 600 nM to about 75 μM, about 600 nM to about 70 μM, about 600 nM to about 65 μM, about 600 nM to about 60 μM, about 600 nM to about 55 μM, about 600 nM to about 50 μM, about 600 nM to about 45 μM, about 600 nM to about 40 μM, about 600 nM to about 35 μM, about 600 nM to about 30 μM, about 600 nM to about 25 μM, about 600 nM to about 20 μM, about 600 nM to about 15 μM, about 600 nM to about 10 μM, about 600 nM to about 5 μM, about 600 nM to about 1 μM, about 600 nM to about 900 nM, about 600 nM to about 800 nM, about 600 nM to about 700 nM, about 700 nM to about 100 μM, about 700 nM to about 95 μM, about 700 nM to about 90 μM, about 700 nM to about 85 μM, about 700 nM to about 80 M, about 700 nM to about 75 μM, about 700 nM to about 70 μM, about 700 nM to about 65 μM, about 700 nM to about 60 μM, about 700 nM to about 55 μM, about 700 nM to about 50 M, about 700 nM to about 45 μM, about 700 nM to about 40 μM, about 700 nM to about 35 μM, about 700 nM to about 30 μM, about 700 nM to about 25 μM, about 700 nM to about 20 M, about 700 nM to about 15 μM, about 700 nM to about 10 μM, about 700 nM to about 5 μM, about 700 nM to about 1 μM, about 700 nM to about 900 nM, about 700 nM to about 800 nM, about 800 nM to about 100 μM, about 800 nM to about 95 μM, about 800 nM to about 90 M, about 800 nM to about 85 μM, about 800 nM to about 80 μM, about 800 nM to about 75 μM, about 800 nM to about 70 μM, about 800 nM to about 65 μM, about 800 nM to about 60 M, about 800 nM to about 55 μM, about 800 nM to about 50 μM, about 800 nM to about 45 μM, about 800 nM to about 40 μM, about 800 nM to about 35 μM, about 800 nM to about 30 M, about 800 nM to about 25 μM, about 800 nM to about 20 μM, about 800 nM to about 15 μM, about 800 nM to about 10 μM, about 800 nM to about 5 μM, about 800 nM to about 1 μM, about 800 nM to about 900 nM, about 900 nM to about 100 μM, about 900 nM to about 95 μM, about 900 nM to about 90 μM, about 900 nM to about 85 μM, about 900 nM to about 80 μM, about 900 nM to about 75 μM, about 900 nM to about 70 μM, about 900 nM to about 65 μM, about 900 nM to about 60 μM, about 900 nM to about 55 μM, about 900 nM to about 50 μM, about 900 nM to about 45 μM, about 900 nM to about 40 μM, about 900 nM to about 35 μM, about 900 nM to about 30 μM, about 900 nM to about 25 μM, about 900 nM to about 20 μM, about 900 nM to about 15 μM, about 900 nM to about 10 μM, about 900 nM to about 5 μM, about 900 nM to about 1 μM, about 1 μM to about 100 μM, about 1 μM to about 95 μM, about 1 μM to about 90 μM, about 1 μM to about 85 μM, about 1 μM to about 80 M, about 1 μM to about 75 μM, about 1 μM to about 70 μM, about 1 μM to about 65 μM, about 1 μM to about 60 μM, about 1 μM to about 55 μM, about 1 μM to about 50 μM, about 1 μM to about 45 μM, about 1 μM to about 40 μM, about 1 μM to about 35 μM, about 1 μM to about 30 μM, about 1 μM to about 25 μM, about 1 μM to about 20 μM, about 1 μM to about 15 μM, about 1 μM to about 10 μM, about 1 μM to about 5 μM, about 5 μM to about 100 μM, about 5 μM to about 95 μM, about 5 μM to about 90 μM, about 5 μM to about 85 μM, about 5 μM to about 80 μM, about 5 μM to about 75 μM, about 5 μM to about 70 μM, about 5 μM to about 65 μM, about 5 μM to about 60 μM, about 5 μM to about 55 μM, about 5 μM to about 50 μM, about 5 μM to about 45 μM, about 5 μM to about 40 μM, about 5 μM to about 35 μM, about 5 μM to about 30 μM, about 5 μM to about 25 μM, about 5 μM to about 20 M, about 5 μM to about 15 μM, about 5 μM to about 10 μM, about 10 μM to about 100 μM, about 10 μM to about 95 μM, about 10 μM to about 90 μM, about 10 μM to about 85 μM, about 10 μM to about 80 μM, about 10 μM to about 75 μM, about 10 μM to about 70 M, about 10 μM to about 65 μM, about 10 μM to about 60 μM, about 10 μM to about 55 μM, about 10 μM to about 50 μM, about 10 μM to about 45 μM, about 10 μM to about 40 μM, about 10 μM to about 35 μM, about 10 μM to about 30 μM, about 10 μM to about 25 μM, about 10 μM to about 20 μM, about 10 μM to about 15 μM, about 15 μM to about 100 μM, about 15 μM to about 95 μM, about 15 μM to about 90 μM, about 15 μM to about 85 μM, about 15 μM to about 80 μM, about 15 μM to about 75 μM, about 15 μM to about 70 M, about 15 μM to about 65 μM, about 15 μM to about 60 μM, about 15 μM to about 55 μM, about 15 μM to about 50 μM, about 15 μM to about 45 μM, about 15 μM to about 40 M, about 15 μM to about 35 μM, about 15 μM to about 30 μM, about 15 μM to about 25 μM, about 15 μM to about 20 μM, about 20 μM to about 100 μM, about 20 μM to about 95 μM, about 20 μM to about 90 μM, about 20 μM to about 85 μM, about 20 μM to about 80 M, about 20 μM to about 75 μM, about 20 μM to about 70 μM, about 20 μM to about 65 μM, about 20 μM to about 60 μM, about 20 μM to about 55 μM, about 20 μM to about 50 M, about 20 μM to about 45 μM, about 20 μM to about 40 μM, about 20 μM to about 35 μM, about 20 μM to about 30 μM, about 20 μM to about 25 μM, about 25 μM to about 100 μM, about 25 μM to about 95 μM, about 25 μM to about 90 μM, about 25 μM to about 85 μM, about 25 μM to about 80 μM, about 25 μM to about 75 μM, about 25 μM to about 70 μM, about 25 μM to about 65 μM, about 25 μM to about 60 μM, about 25 μM to about 55 μM, about 25 μM to about 50 μM, about 25 μM to about 45 μM, about 25 μM to about 40 M, about 25 μM to about 35 μM, about 25 μM to about 30 μM, about 30 μM to about 100 μM, about 30 μM to about 95 μM, about 30 μM to about 90 μM, about 30 μM to about 85 μM, about 30 μM to about 80 μM, about 30 μM to about 75 μM, about 30 μM to about 70 μM, about 30 μM to about 65 μM, about 30 μM to about 60 μM, about 30 μM to about 55 μM, about 30 μM to about 50 μM, about 30 μM to about 45 μM, about 30 μM to about 40 M, about 30 μM to about 35 μM, about 35 μM to about 100 μM, about 35 μM to about 95 μM, about 35 μM to about 90 μM, about 35 μM to about 85 μM, about 35 μM to about 80 M, about 35 μM to about 75 μM, about 35 μM to about 70 μM, about 35 μM to about 65 μM, about 35 μM to about 60 μM, about 35 μM to about 55 μM, about 35 μM to about 50 M, about 35 μM to about 45 μM, about 35 μM to about 40 μM, about 40 μM to about 100 μM, about 40 μM to about 95 μM, about 40 μM to about 90 μM, about 40 μM to about 85 μM, about 40 μM to about 80 μM, about 40 μM to about 75 μM, about 40 μM to about 70 M, about 40 μM to about 65 μM, about 40 μM to about 60 μM, about 40 μM to about 55 μM, about 40 μM to about 50 μM, about 40 μM to about 45 μM, about 45 μM to about 100 μM, about 45 μM to about 95 μM, about 45 μM to about 90 μM, about 45 μM to about 85 μM, about 45 μM to about 80 μM, about 45 μM to about 75 μM, about 45 μM to about 70 M, about 45 μM to about 65 μM, about 45 μM to about 60 μM, about 45 μM to about 55 μM, about 45 μM to about 50 μM, about 50 μM to about 100 μM, about 50 μM to about 95 μM, about 50 μM to about 90 μM, about 50 μM to about 85 μM, about 50 μM to about 80 M, about 50 μM to about 75 μM, about 50 μM to about 70 μM, about 50 μM to about 65 μM, about 50 μM to about 60 μM, about 50 μM to about 55 μM, about 55 μM to about 100 μM, about 55 μM to about 95 μM, about 55 μM to about 90 μM, about 55 μM to about 85 μM, about 55 μM to about 80 μM, about 55 μM to about 75 μM, about 55 μM to about 70 M, about 55 μM to about 65 μM, about 55 μM to about 60 μM, about 60 μM to about 100 μM, about 60 μM to about 95 μM, about 60 μM to about 90 μM, about 60 μM to about 85 μM, about 60 μM to about 80 μM, about 60 μM to about 75 μM, about 60 μM to about 70 M, about 60 μM to about 65 μM, about 65 μM to about 100 μM, about 65 μM to about 95 μM, about 65 μM to about 90 μM, about 65 μM to about 85 μM, about 65 μM to about 80 M, about 65 μM to about 75 μM, about 65 μM to about 70 μM, about 70 μM to about 100 μM, about 70 μM to about 95 μM, about 70 μM to about 90 μM, about 70 μM to about 85 μM, about 70 μM to about 80 μM, about 70 μM to about 75 μM, about 75 μM to about 100 μM, about 75 μM to about 95 μM, about 75 μM to about 90 μM, about 75 μM to about 85 μM, about 75 μM to about 80 μM, about 80 μM to about 100 μM, about 80 μM to about 95 μM, about 80 μM to about 90 μM, about 80 μM to about 85 μM, about 85 μM to about 100 μM, about 85 μM to about 95 μM, about 85 μM to about 90 μM, about 90 μM to about 100 μM, about 90 μM to about 95 μM, or about 95 μM to about 100 μM.

### Exemplary Embodiments

### Endoscopes, Ingestible Devices, and Reservoirs Containing the Drug

[0988] The GI tract can be imaged using endoscopes, or more recently ingestible devices that are swallowed.

[0989] The technology behind standard colonoscopy consists of a long, semi-rigid insertion tube with a steerable tip (stiff if compared to the colon), which is pushed by the physician from the outside. However, invasiveness, patient discomfort, fear of pain, and -more often than not—the need for conscious sedation limit the take-up of screening colonoscopy. Diagnosis and treatment in the GI tract are dominated by the use of flexible endoscopes. A few large companies, namely Olympus Medical Systems Co. (Tokyo, Japan), Pentax Medical Co. (Montvale, N.J., USA), Fujinon, Inc. (Wayne, N.J., USA) and Karl Storz GmbH & Co. KG (Tuttlingen, Germany), cover the majority of the market in flexible GI endoscopy.

[0990] Endoscopes may comprise a catheter. As an example, the catheter may be a spray catheter. As an example, a spray catheter may be used to deliver dyes for diagnostic purposes. As an example, a spray catheter may be used to deliver a therapeutic agent at an intended site in the GI tract. For example, the Olypmus PW-205V is a ready-to-use spray catheter that enables efficient spraying for maximal differentiation of tissue structures during endoscopy, but may also be used to deliver drugs.

[0991] Endoscopes may comprise a catheter. As an example, the catheter may be a spray catheter. As an example, a spray catheter may be used to deliver dyes for diagnostic purposes. As an example, a spray catheter may be used to deliver a therapeutic agent at the site of disease in the GI tract. For example, the Olypmus PW-205V is a ready-to-use spray catheter that enables efficient spraying for maximal differentiation of tissue structures during endoscopy, but may also be used to deliver drugs diseased tissue.

[0992] In a review of robotic endoscopic capsules, Journal of Micro-Bio Robotics 11.1-4 (2016): 1-18, Ciuti et al. state that progress in micro-electromechanical systems (MEMS) technologies have led to the development of new endoscopic capsules with enhanced diagnostic capabilities, in addition to traditional visualization of mucosa (embedding, e.g. pressure, pH, blood detection and temperature sensors).

[0993] Endoscopic capsules, however, do not have the capability of accurately locating a site autonomously. They require doctor oversight over a period of hours in order to manually determine the location. Autonomous ingestible devices are advantageous in that regard.

[0994] Ingestible devices are also advantageous over spray catheters in that they are less invasive, thereby allowing for regular dosing more frequently than spray catheters. Another advantage of ingestible devices is the greater ease with which they can access, relative to a catheter, certain sections of the GI tract such as the ascending colon, the cecum, and all portions of the small intestine.

### Methods and Mechanisms for Localization

[0995] In addition to, or as an alternative, to directly visualizing the GI tract, one or more different mechanisms can be used to determine the location of an ingestible device within the GI tract. Various implementations may be used for localization of ingestible devices within the GI tract. For example, certain implementations can include one or more electromagnetic sensor coils, magnetic fields, electromagnetic waves, electric potential values, ultrasound positioning systems, gamma scintigraphy techniques or other radio-tracker technology have been described by others. Alternatively, imaging can be used to localize, for example, using anatomical landmarks or more complex algorithms for 3D reconstruction based on multiple images. Other technologies rely on radio frequency, which relies on sensors placed externally on the body to receive the strength of signals emitted by the capsule. Ingestible devices may also be localized based on reflected light in the medium surrounding the device; pH; temperature; time following ingestion; and/or acoustic signals.

[0996] The disclosure provides an ingestible device, as well as related systems and methods that provide for determining the position of the ingestible device within the GI tract of a subject with very high accuracy. In some embodiments, the ingestible device can autonomously determine its position within the GI tract of the subject.

[0997] Typically, the ingestible device includes one or more processing devices, and one more machine readable hardware storage devices. In some embodiments, the one or more machine readable hardware storage devices store instructions that are executable by the one or more processing devices to determine the location of the ingestible device in a portion of a GI tract of the subject. In certain embodiments, the one or more machine readable hardware storage devices store instructions that are executable by the one or more processing devices to transmit data to an external device (e.g., abase station external to the subject, such as abase station carried on an article worn by the subject) capable of implementing the data to determine the location of the device within the GI tract of the subject.

[0998] In some embodiments, the location of the ingestible device within the GI tract of the subject can be determined to an accuracy of at least 85%, e.g., at least 90%, at least 95%, at least 97%, at least 98%, at least 99%, 100%. In some embodiments, the location of the ingestible device within the GI tract of the subject can be determined to an accuracy of at least 85%, e.g., at least 90%, at least 95%, at least 97%, at least 98%, at least 99%, 100%. In such embodiments, the portion of the GI tract of the subject can include, for example, the esophagus, the stomach, duodenum, the jejunum, and/or the terminal ileum, cecum and colon. An exemplary and non-limiting embodiment is provided below in Example 14.

[0999] In certain embodiments, the location of the ingestible device within the esophagus of the subject can be determined to an accuracy of at least 85%, e.g., at least 90%, at least 95%, at least 97%, at least 98%, at least 99%, 100%. An exemplary and non-limiting embodiment is provided below in Example 14.

[1000] In some embodiments, the location of the ingestible device within the stomach of the subject can be determined to an accuracy of at least 85%, e.g., at least 90%, at least 95%, at least 97%, at least 98%, at least 99%, 100%. An exemplary and non-limiting embodiment is provided below in Example 14.

[1001] In certain embodiments, the location of the ingestible device within the duodenum of the subject can be determined to an accuracy of at least 85%, e.g., at least 90%, at least 95%, at least 97%, at least 98%, at least 99%, 100%. An exemplary and non-limiting embodiment is provided below in Example 14.

[1002] In some embodiments, the location of the ingestible device within the jejunum of the subject can be determined to an accuracy of at least 85%, e.g., at least 90%, at least 95%, at least 97%, at least 98%, at least 99%, 100%. An exemplary and non-limiting embodiment is provided below in Example 14.

[1003] In certain embodiments, the location of the ingestible device within the terminal ileum, cecum and colon of the subject can be determined to an accuracy of at least 85%, e.g., at least 90%, at least 95%, at least 97%, at least 98%, at least 99%, 100%.

[1004] In some embodiments, the location of the ingestible device within the cecum of the subject can be determined to an accuracy of at least 85%, e.g., at least 90%, at least 95%, at least 97%, at least 98%, at least 99%, 100%. An exemplary and non-limiting embodiment is provided below in Example 14. In such embodiments, the portion of the portion of the GI tract of the subject can include, for example, the esophagus, the stomach, duodenum, the jejunum, and/or the terminal ileum, cecum and colon.

[1005] In certain embodiments, the location of the ingestible device within the esophagus of the subject can be determined to an accuracy of at least 85%, e.g., at least 90%, at least 95%, at least 97%, at least 98%, at least 99%, 100%.

[1006] In some embodiments, the location of the ingestible device within the stomach of the subject can be determined to an accuracy of at least 85%, e.g., at least 90%, at least 95%, at least 97%, at least 98%, at least 99%, 100%.

[1007] In certain embodiments, the location of the ingestible device within the duodenum of the subject can be determined to an accuracy of at least 85%, e.g., at least 90%, at least 95%, at least 97%, at least 98%, at least 99%, 100%.

[1008] In some embodiments, the location of the ingestible device within the jejunum of the subject can be determined to an accuracy of at least 85%, e.g., at least 90%, at least 95%, at least 97%, at least 98%, at least 99%, 100%.

[1009] In certain embodiments, the location of the ingestible device within the terminal ileum, cecum and colon of the subject can be determined to an accuracy of at least 85%, e.g., at least 90%, at least 95%, at least 97%, at least 98%, at least 99%, 100%.

[1010] In some embodiments, the location of the ingestible device within the cecum of the subject can be determined to an accuracy of at least 85%, e.g., at least 90%, at least 95%, at least 97%, at least 98%, at least 99%, 100%.

[1011] As used herein, the term “reflectance” refers to a value derived from light emitted by the device, reflected back to the device, and received by a detector in or on the device. For example, in some embodiments this refers to light emitted by the device, wherein a portion of the light is reflected by a surface external to the device, and the light is received by a detector located in or on the device.

[1012] As used herein, the term “illumination” refers to any electromagnetic emission. In some embodiments, an illumination may be within the range of Infrared Light (IR), the visible spectrum and ultraviolet light (UV), and an illumination may have a majority of its power centered at a particular wavelength in the range of 100 nm to 1000 nm. In some embodiments, it may be advantageous to use an illumination with a majority of its power limited to one of the infrared (750 nm-1000 nm), red (600 nm-750 nm), green (495 nm-600 nm), blue (400 nm-495 nm), or ultraviolet (100 nm-400 nm) spectrums. In some embodiments a plurality of illuminations with different wavelengths may be used. For illustrative purposes, the embodiments described herein may refer to the use of green or blue spectrums of light. However, it is understood that these embodiments may use any suitable light having a wavelength that is substantially or approximately within the green or blue spectra defined above, and the localization systems and methods described herein may use any suitable spectra of light.

[1013] Referring now to FIG. 1, shown therein is a view of an example embodiment of an ingestible device 100, which may be used to identify a location within a gastrointestinal (GI) tract. In some embodiments, ingestible device 100 may be configured to autonomously determine whether it is located in the stomach, a particular portion of the small intestine such as a duodenum, jejunum, or ileum, or the large intestine by utilizing sensors operating with different wavelengths of light. Additionally, ingestible device 100 may be configured to autonomously determine whether it is located within certain portions of the small intestine or large intestine, such as the duodenum, the jejunum, the cecum, or the colon.

[1014] Ingestible device 100 may have a housing 102 shaped similar to a pill or capsule. The housing 102 of ingestible device 100 may have a first end portion 104, and a second end portion 106. The first end portion 104 may include a first wall portion 108, and second end portion 106 may include a second wall portion 110. In some embodiments, first end portion 104 and second end portion 106 of ingestible device 100 may be manufactured separately, and may be affixed together by a connecting portion 112.

[1015] In some embodiments, ingestible device 100 may include an optically transparent window 114. Optically transparent window 114 may be transparent to various types of illumination in the visible spectrum, infrared spectrum, or ultraviolet light spectrum, and ingestible device 100 may have various sensors and illuminators located within the housing 102, and behind the transparent window 114. This may allow ingestible device 100 to be configured to transmit illumination at different wavelengths through transparent window 114 to an environment external to housing 102 of ingestible device 100, and to detect a reflectance from a portion of the illumination that is reflected back through transparent window 114 from the environment external to housing 102. Ingestible device 100 may then use the detected level of reflectance in order to determine a location of ingestible device 100 within a GI tract. In some embodiments, optically transparent window 114 may be of any shape and size, and may wrap around the circumference of ingestible device 100. In this case, ingestible device 100 may have multiple sets of sensors and illuminators positioned at different locations azimuthally behind window 114.

[1016] In some embodiments, ingestible device 100 may optionally include an opening 116 in the second wall portion 110. In some embodiments, the second wall portion 110 may be configured to rotate around the longitudinal axis of ingestible device 100 (e.g., by means of a suitable motor or other actuator housed within ingestible device 100). This may allow ingestible device 100 to obtain a fluid sample from the GI tract, or release a substance into the GI tract, through opening 116.

[1017] FIG. 2 shows an exploded view of ingestible device 100. In some embodiments, ingestible device 100 may optionally include a rotation assembly 118. Optional rotation assembly 118 may include a motor 118-1 driven by a microcontroller (e.g., a microcontroller coupled to printed circuit board 120), a rotation position sensing ring 118-2, and a storage sub-unit 118-3 configured to fit snugly within the second end portion 104. In some embodiments, rotation assembly 118 may cause second end portion 104, and opening 116, to rotate relative to the storage sub-unit 118-3. In some embodiments, there may be cavities on the side of storage sub-unit 118-3 that function as storage chambers. When the opening 116 is aligned with a cavity on the side of the storage sub-unit 118-3, the cavity on the side of the storage sub-unit 118-3 may be exposed to the environment external to the housing 102 of ingestible device 100. In some embodiments, the storage sub-unit 118-3 may be loaded with a medicament or other substance prior to the ingestible device 100 being administered to a subject. In this case, the medicament or other substance may be released from the ingestible device 100 by aligning opening 116 with the cavity within storage sub-unit 118-3. In some embodiments, the storage sub-unit 118-3 may be configured to hold a fluid sample obtained from the GI tract. For example, ingestible device 100 may be configured to align opening 116 with the cavity within storage sub-unit 118-3, thus allowing a fluid sample from the GI tract to enter the cavity within storage sub-unit 118-3. Afterwards, ingestible device 100 may be configured to seal the fluid sample within storage sub-unit 118-3 by further rotating the second end portion 106 relative to storage sub-unit 118-3. In some embodiments, storage sub-unit 118-3 may also contain a hydrophilic sponge, which may enable ingestible device 100 to better draw certain types of fluid samples into ingestible device 100. In some embodiments, ingestible device 100 may be configured to either obtain a sample from within the GI tract, or to release a substance into the GI tract, in response to determining that ingestible device 100 has reached a predetermined location within the GI tract. For example, ingestible device 100 may be configured to obtain a fluid sample from the GI tract in response to determining that the ingestible device has entered the jejunum portion of the small intestine (e.g., as determined by process 900 discussed in relation to FIG. 9). Other ingestible devices capable of obtaining samples or releasing substances are discussed in commonly-assigned PCT Application No. PCT/CA2013/000133 filed Feb. 15, 2013, commonly-assigned U.S. Provisional Application No. 62/385,553, and commonly-assigned U.S. Provisional Application No. 62/376,688, which each are hereby incorporated by reference herein in their entirety. It is understood that any suitable method of obtaining samples or releasing substances may be incorporated into some of the embodiments of the ingestible devices disclosed herein, and that the systems and methods for determining a location of an ingestible device may be incorporated into any suitable type of ingestible device.

[1018] Ingestible device 100 may include a printed circuit board (PCB) 120, and a battery 128 configured to power PCB 120. PCB 120 may include a programmable microcontroller, and control and memory circuitry for holding and executing firmware or software for coordinating the operation of ingestible device 100, and the various components of ingestible device 100. For example, PCB 120 may include memory circuitry for storing data, such as data sets of measurements collected by sensing sub-unit 126, or instructions to be executed by control circuitry to implement a localization process, such as, for example, one or more of the processes, discussed herein, including those discussed below in connection with one or more of the associated flow charts. PCB 120 may include a detector 122 and an illuminator 124, which together form sensing sub-unit 126. In some embodiments, control circuitry within PCB 120 may include processing units, communication circuitry, or any other suitable type of circuitry for operating ingestible device 100. For illustrative purposes, only a single detector 122 and a single illuminator 124 forming a single sensing sub-unit 126 are shown. However, it is understood that in some embodiments there may be multiple sensing sub-units, each with a separate illuminator and detector, within ingestible device 100. For example, there may be several sensing sub-units spaced azimuthally around the circumference of the PCB 120, which may enable ingestible device 100 to transmit illumination and detect reflectances or ambient light in all directions around the circumference of the device. In some embodiments, sensing sub-unit 126 may be configured to generate an illumination using illuminator 124, which is directed through the window 114 in a radial direction away from ingestible device 100. This illumination may reflect off of the environment external to ingestible device 100, and the reflected light coming back into ingestible device 100 through window 114 may be detected as a reflectance by detector 122.

[1019] In some embodiments, window 114 may be of any suitable shape and size. For example, window 114 may extend around a full circumference of ingestible device 100. In some embodiments there may be a plurality of sensing sub-units (e.g., similar to sensing sub-unit 126) located at different positions behind the window. For example, three sensing sub-units may be positioned behind the window at the same longitudinal location, but spaced 120 degrees apart azimuthally. This may enable ingestible device 100 to transmit illuminations in all directions radially around ingestible device 100, and to measure each of the corresponding reflectances.

[1020] In some embodiments, illuminator 124 may be capable of producing illumination at a variety of different wavelengths in the ultraviolet, infrared, or visible spectrum. For example, illuminator 124 may be implemented by using Red-Green-Blue Light-Emitting diode packages (RGB-LED). These types of RGB-LED packages are able to transmit red, blue, or green illumination, or combinations of red, blue, or green illumination. Similarly, detector 122 may be configured to sense reflected light of the same wavelengths as the illumination produced by illuminator 124. For example, if illuminator 124 is configured to produce red, blue, or green illumination, detector 122 may be configured to detect different reflectances produced by red, blue, or green illumination (e.g., through the use of an appropriately configured photodiode). These detected reflectances may be stored by ingestible device 100 (e.g., within memory circuitry of PCB 120), and may then be used by ingestible device 100 in determining a location of ingestible device 100 within the GI tract (e.g., through the use of process 500 (FIG. 5), process 600 (FIG. 6), or process 900 (FIG. 9)).

[1021] It is understood that ingestible device 100 is intended to be illustrative, and not limiting. It will be understood that modifications to the general shape and structure of the various devices and mechanisms described in relation to FIG. 1 and FIG. 2 may be made without significantly changing the functions and operations of the devices and mechanisms. For example, ingestible device 100 may have a housing formed from a single piece of molded plastic, rather than being divided into a first end portion 104 and a second end portion 106. As an alternate example, the location of window 114 within ingestible device 100 may be moved to some other location, such as the center of ingestible device 100, or to one of the ends of ingestible device 100. Moreover, the systems and methods discussed in relation to FIGS. 1-10 may be implemented on any suitable type of ingestible device, provided that the ingestible device is capable of detecting reflectances or levels of illumination in some capacity. For example, in some embodiments ingestible device 100 may be modified to replace detector 122 with an image sensor, and the ingestible device may be configured to measure relative levels of red, blue, or green light by decomposing a recorded image into its individual spectral components. Other examples of ingestible devices with localization capabilities, which may be utilized in order to implement the systems and methods discussed in relation to FIG. 1-11, are discussed in co-owned PCT Application No. PCT/US2015/052500 filed on Sep. 25, 2015, which is hereby incorporated by reference herein in its entirety. Furthermore, it should be noted that the features and limitations described in any one embodiment may be applied to any other embodiment herein, and the descriptions and examples relating to one embodiment may be combined with any other embodiment in a suitable manner.

[1022] FIG. 3 is a diagram of an ingestible device during an example transit through a gastrointestinal (GI) tract, in accordance with some embodiments of the disclosure. Ingestible device 300 may include any portion of any other ingestible device discussed in this disclosure (e.g., ingestible device 100 (FIG. 1)), and may be any suitable type of ingestible device with localization capabilities. For example, ingestible device 300 may be one embodiment of ingestible device 100 without the optional opening 116 (FIG. 1) or optional rotation assembly 118 (FIG. 2)). In some embodiments, ingestible device 300 may be ingested by a subject, and as ingestible device 300 traverses the GI tract, ingestible device 300 may be configured to determine its location within the GI tract. For example, the movement of ingestible device 300 and the amount of light detected by ingestible device 300 (e.g., via detector 122 (FIG. 2)) may vary substantially depending on the location of ingestible device 300 within the GI tract, and ingestible device 300 may be configured to use this information to determine a location of ingestible device 300 within the GI tract. For instance, ingestible device 300 may detect ambient light from the surrounding environment, or reflectances based on illumination generated by ingestible device 300 (e.g., generated by illuminator 124 (FIG. 1)), and use this information to determine a location of ingestible device 300 through processes, such as described herein. The current location of ingestible device 300, and the time that ingestible device 300 detected each transition between the various portions of the GI tract, may then be stored by ingestible device 300 (e.g., in memory circuitry of PCB 120 (FIG. 2)), and may be used for any suitable purpose.

[1023] Shortly after ingestible device 300 is ingested, ingestible device will traverse the esophagus 302, which may connect the subject's mouth to a stomach 306. In some embodiments, ingestible device 300 may be configured to determine that it has entered the esophagus portion GI tract by measuring the amount and type of light (e.g., via detector 122 (FIG. 2)) in the environment surrounding the ingestible device 300. For instance, ingestible device 300 may detect higher levels of light in the visible spectrum (e.g., via detector 122 (FIG. 2)) while outside the subject's body, as compared to the levels of light detected while within the GI tract. In some embodiments, ingestible device 300 may have previously stored data (e.g., on memory circuitry of PCB 120 (FIG. 2)) indicating a typical level of light detected when outside of the body, and the ingestible device 300 may be configured to determine that entry to the body has occurred when a detected level of light (e.g., detected via detector 122 (FIG. 2)) has been reduced beyond a threshold level (e.g., at least a 20-30% reduction) for a sufficient period of time (e.g., 5.0 seconds).

[1024] In some embodiments, ingestible device 300 may be configured to detect a transition from esophagus 302 to stomach 306 by passing through sphincter 304. In some embodiments, ingestible device 300 may be configured to determine whether it has entered stomach 306 based at least in part on a plurality of parameters, such as but not limited to the use of light or temperature measurements (e.g., via detector 122 (FIG. 2) or via a thermometer within ingestible device 300), pH measurements (e.g., via a pH meter within ingestible device 300), time measurements (e.g., as detected through the use of clock circuitry included within PCB 120 (FIG. 2)), or any other suitable information. For instance, ingestible device 300 may be configured to determine that ingestible device 300 has entered stomach 306 after detecting that a measured temperature of ingestible device 300 exceeds 31 degrees Celsius. Additionally or alternately, ingestible device 300 may be configured to automatically determine it has entered stomach 306 after one minute (or another pre-set time duration parameter, 80 seconds, 90 seconds, etc.) has elapsed from the time that ingestible device 300 was ingested, or one minute (or another pre-set time duration parameter, 80 seconds, 90 seconds, etc.) from the time that ingestible device 300 detected that it has entered the GI tract.

[1025] Stomach 306 is a relatively large, open, and cavernous organ, and therefore ingestible device 300 may have a relatively large range of motion. By comparison, the motion of ingestible device 300 is relatively restricted within the tube-like structure of the duodenum 310, the jejunum 314, and the ileum (not shown), all of which collectively form the small intestine. Additionally, the interior of stomach 306 has distinct optical properties from duodenum 310 and jejunum 314, which may enable ingestible device 300 to detect a transition from stomach 306 to duodenum 310 through the appropriate use of measured reflectances (e.g., through the use of reflectances measured by detector 122 (FIG. 2)), as used in conjunction with process 600 (FIG. 6)).

[1026] In some embodiments, ingestible device 300 may be configured to detect a pyloric transition from stomach 306 to duodenum 310 through the pylorus 308. For instance, in some embodiments, ingestible device 300 may be configured to periodically generate illumination in the green and blue wavelengths (e.g., via illuminator 124 (FIG. 2)), and measure the resulting reflectances (e.g., via detector 122 (FIG. 2)). Ingestible device 300 may be configured to then use a ratio of the detected green reflectance to the detected blue reflectance to determine whether ingestible device 300 is located within the stomach 306, or duodenum 310 (e.g., via process 600 (FIG. 6)). In turn, this may enable ingestible device 300 to detect a pyloric transition from stomach 306 to duodenum 310, an example of which is discussed in relation to FIG. 6.

[1027] Similarly, in some embodiments, ingestible device 300 may be configured to detect a reverse pyloric transition from duodenum 310 to stomach 306. Ingestible device 300 will typically transition naturally from stomach 306 to duodenum 310, and onward to jejunum 314 and the remainder of the GI tract. However, similar to other ingested substances, ingestible device 300 may occasionally transition from duodenum 310 back to stomach 306 as a result of motion of the subject, or due to the natural behavior of the organs with the GI tract. To accommodate this possibility, ingestible device 300 may be configured to continue to periodically generate illumination in the green and blue wavelengths (e.g., via illuminator 124 (FIG. 2)), and measure the resulting reflectances (e.g., via detector 122 (FIG. 2)) to detect whether or not ingestible device 300 has returned to stomach 306. An exemplary detection process is described in additional detail in relation to FIG. 6.

[1028] After entering duodenum 310, ingestible device 300 may be configured to detect a transition to the jejunum 314 through the duodenojejunal flexure 312. For example, ingestible device 300 may be configured to use reflectances to detect peristaltic waves within the jejunum 314, caused by the contraction of the smooth muscle tissue lining the walls of the jejunum 314. In particular, ingestible device 300 may be configured to begin periodically transmitting illumination (and measuring the resulting reflectances (e.g., via detector 122 and illuminator 124 of sensing sub-unit 126 (FIG. 2)) at a sufficiently high frequency in order to detect muscle contractions within the jejunum 314. Ingestible device 300 may then determine that it has entered the jejunum 314 in response to having detected either a first muscle contraction, or a predetermined number of muscle contractions (e.g., after having detected three muscle contractions in sequence). The interaction of ingestible device 300 with the walls of jejunum 314 is also discussed in relation to FIG. 4, and an example of this detection process is described in additional detail in relation to FIG. 9.

[1029] FIG. 4 is a diagram of an ingestible device during an example transit through a jejunum, in accordance with some embodiments of the disclosure. Diagrams 410, 420, 430, and 440 depict ingestible device 400 as it traverses through a jejunum (e.g., jejunum 314), and how ingestible device 400 interacts with peristaltic waves formed by walls 406A and 406B (collectively, walls 406) of the jejunum. In some implementations, ingestible device 400 may include any portion of any other ingestible device discussed in this disclosure (e.g., ingestible device 100 (FIG. 1) or ingestible device 300 (FIG. 3)), and may be any suitable type of ingestible device with localization capabilities. For example, ingestible device 400 may be substantially similar to the ingestible device 300 (FIG. 3) or ingestible device 100 (FIG. 1), with window 404 being the same as window 114 (FIG. 1), and sensing sub-unit 402 being the same as sensing sub-unit 126 (FIG. 2).

[1030] Diagram 410 depicts ingestible device 400 within the jejunum, when the walls 406 of the jejunum are relaxed. In some embodiments, the confined tube-like structure of the jejunum naturally causes ingestible device 400 to be oriented longitudinally along the length of the jejunum, with window 404 facing walls 406. In this orientation, ingestible device 400 may use sensing sub-unit 402 to generate illumination (e.g., via illuminator 124 (FIG. 2)) oriented towards walls 406, and to detect the resulting reflectances (e.g., via detector 122 (FIG. 2)) from the portion of the illumination reflected off of walls 406 and back through window 404. In some embodiments, ingestible device 400 may be configured to use sensing sub-unit 402 to generate illumination and measure the resulting reflectance with sufficient frequency to detect peristaltic waves within the jejunum. For instance, in a healthy human subject, peristaltic waves may occur at a rate of approximately 0.1 Hz to 0.2 Hz. Therefore, the ingestible device 400 may be configured to generate illumination and measure the resulting reflectance at least once every 2.5 seconds (i.e., the minimum rate necessary to detect a 0.2 Hz signal), and preferably at a higher rate, such as once every 0.5 seconds, which may improve the overall reliability of the detection process due to more data points being available. It is understood that the ingestible device 400 need not gather measurements at precise intervals, and in some embodiments the ingestible device 400 may be adapted to analyze data gathered at more irregular intervals, provided that there are still a sufficient number of appropriately spaced data points to detect 0.1 Hz to 0.2 Hz signals.

[1031] Diagram 420 depicts ingestible device 400 within the jejunum, when the walls 406 of the jejunum begin to contract and form a peristaltic wave. Diagram 420 depicts contracting portion 408A of wall 406A and contracting portion 408B of wall 406B (collectively, contracting portion 408 of wall 406) that forma peristaltic wave within the jejunum. The peristaltic wave proceeds along the length of the jejunum as different portions of wall 406 contract and relax, causing it to appear as if contracting portions 408 of wall 406 proceed along the length of the jejunum (i.e., as depicted by contracting portions 408 proceeding from left to right in diagrams 410-430). While in this position, ingestible device 400 may detect a similar level of reflectance (e.g., through the use of illuminator 124 and detector 122 of sensing sub-unit 126 (FIG. 2)) as detected when there is no peristaltic wave occurring (e.g., as detected when ingestible device 400 is in the position indicated in diagram 410).

[1032] Diagram 430 depicts ingestible device 400 within the jejunum, when the walls 406 of the jejunum continue to contract, squeezing around ingestible device 400. As the peristaltic wave proceeds along the length of the jejunum, contracting portions 408 of wall 406 may squeeze tightly around ingestible device 400, bringing the inner surface of wall 406 into contact with window 404. While in this position, ingestible device 400 may detect a change in a reflectance detected as a result of illumination produced by sensing sub-unit 402. The absolute value of the change in the measured reflectance may depend on several factors, such as the optical properties of the window 404, the spectral components of the illumination, and the optical properties of the walls 406. However, ingestible device 400 may be configured to store a data set with the reflectance values over time, and search for periodic changes in the data set consistent with the frequency of the peristaltic waves (e.g., by analyzing the data set in the frequency domain, and searching for peaks between 0.1 Hz to 0.2 Hz). This may enable ingestible device 400 to detect muscle contractions due to peristaltic waves without foreknowledge of the exact changes in reflectance signal amplitude that may occur as a result of detecting the muscle contractions of the peristaltic wave. An example procedure for detecting muscle contractions is discussed further in relation to FIG. 9, and an example of a reflectance data set gathered while ingestible device 400 is located within the jejunum is discussed in relation to FIG. 10.

[1033] Diagram 440 depicts ingestible device 400 within the jejunum, when the peristaltic wave has moved past ingestible device 400. Diagram 440 depicts contracting portions 408 that form the peristaltic wave within the jejunum having moved past the end of ingestible device 400. The peristaltic wave proceeds along the length of the jejunum as different portions of wall 406 contract and relax, causing it to appear as if contracting portions 408 of wall 406 proceed along the length of the jejunum (i.e., as depicted by contracting portions 408 proceeding from left to right in diagrams 410-430). While in this position, ingestible device 400 may detect a similar level of reflectance (e.g., through the use of illuminator 124 and detector 122 of sensing sub-unit 126 (FIG. 2)) as detected when there is no peristaltic wave occurring (e.g., as detected when ingestible device 400 is in the position indicated in diagram 410, or diagram 420).

[1034] Depending on the species of the subject, peristaltic waves may occur relatively with relatively predictable regularity. After the peristaltic wave has passed over ingestible device 400 (e.g., as depicted in diagram 440), the walls 406 of the jejunum may relax again (e.g., as depicted in diagram 410), until the next peristaltic wave begins to form. In some embodiments, ingestible device 400 may be configured to continue to gather reflectance value data while it is within the GI tract, and may store a data set with the reflectance values over time. This may allow ingestible device 400 to detect each of the muscle contractions as the peristaltic wave passes over ingestible device 400 (e.g., as depicted in diagram 430), and may enable ingestible device 400 to both count the number of muscle contractions that occur, and to determine that a current location of the ingestible device 400 is within the jejunum. For example, ingestible device 400 may be configured to monitor for possible muscle contractions while is inside either the stomach or the duodenum, and may determine that ingestible device 400 has moved to the jejunum in response to detecting a muscle contraction consistent with a peristaltic wave.

[1035] FIG. 5 is a flowchart illustrating some aspects of a localization process used by the ingestible device. Although FIG. 5 may be described in connection with the ingestible device 100 for illustrative purposes, this is not intended to be limiting, and either portions or the entirety of the localization procedure 500 described in FIG. 5 may be applied to any device discussed in this application (e.g., the ingestible devices 100, 300, and 400), and any of the ingestible devices may be used to perform one or more parts of the process described in FIG. 5. Furthermore, the features of FIG. 5 may be combined with any other systems, methods or processes described in this application. For example, portions of the process in FIG. 5 may be integrated into or combined with the pyloric transition detection procedure described by FIG. 6, or the jejunum detection process described by FIG. 9.

[1036] At 502, the ingestible device (e.g., ingestible device 100, 300, or 400) gathers measurements (e.g., through detector 122 (FIG. 2)) of ambient light. For example, ingestible device 100 may be configured to periodically measure (e.g., through detector 122 (FIG. 2)) the level of ambient light in the environment surrounding ingestible device 100. In some embodiments, the type of ambient light being measured may depend on the configuration of detector 122 within ingestible device 100. For example, if detector 122 is configured to measure red, green, and blue wavelengths of light, ingestible device 100 may be configured to measure the ambient amount of red, green, and blue light from the surrounding environment. In some embodiments, the amount of ambient light measured by ingestible device 100 will be larger in the area external to the body (e.g., a well-lit room where ingestible device 100 is being administered to a subject) and in the oral cavity of the subject, as compared to the ambient level of light measured by ingestible device 100 when inside of an esophagus, stomach, or other portion of the GI tract (e.g., esophagus 302, stomach 306, duodenum 310, or jejunum 314 (FIG. 3)).

[1037] At 504, the ingestible device (e.g., ingestible device 100, 300, or 400) determines (e.g., via control circuitry within PCB 120 (FIG. 2)) whether the ingestible device has detected entry into the GI tract. For example, ingestible device 100 may be configured to determine when the most recent measurement of ambient light (e.g., the measurement gathered at 502) indicates that the ingestible device has entered the GI tract. For instance, the first time that ingestible device 100 gatherers a measurement of ambient light at 502, ingestible device 100 may store that measurement (e.g., via storage circuitry within PCB 120 (FIG. 2)) as a typical level of ambient light external to the body. Ingestible device 100 may be configured to then compare the most recent measurement of ambient light to the typical level of ambient light external to the body (e.g., via control circuitry within PCB 120 (FIG. 2)), and determine that ingestible device 100 has entered the GI tract when the most recent measurement of ambient light is substantially smaller than the typical level of ambient light external to the body. For example, ingestible device 100 may be configured to detect that it has entered the GI tract in response to determining that the most recent measurement of ambient light is less than or equal to 20% of the typical level of ambient light external to the body. If ingestible device 100 determines that it has detected entry into the GI tract (e.g., that ingestible device 100 has entered at least the esophagus 302 (FIG. 3)), process 500 proceeds to 506. Alternately, if ingestible device 100 determines that it has not detected entry into the GI tract (e.g., as a result of the most recent measurement being similar to the typical level of ambient light external to the body), process 500 proceeds back to 502 where the ingestible device 100 gathers further measurements. For instance, ingestible device 100 may be configured to wait a predetermined amount of time (e.g., five seconds, ten seconds, etc.), and then gather another measurement of the level of ambient light from the environment surrounding ingestible device 100.

[1038] At 506, the ingestible device (e.g., ingestible device 100, 300, or 400) waits for a transition from the esophagus to the stomach (e.g., from esophagus 302 to stomach 306 (FIG. 3)). For example, ingestible device 100 may be configured to determine that it has entered the stomach (e.g., stomach 306 (FIG. 3)) after waiting a predetermined period of time after having entered the GI tract. For instance, a typical esophageal transit time in a human patient may be on the order of 15-30 seconds. In this case, after having detected that ingestible device 100 has entered the GI tract at 504 (i.e., after detecting that ingestible device 100 has reached at least esophagus 302 (FIG. 3)), ingestible device 100 may be configured to wait one minute, or a similar amount of time longer than the typical esophageal transmit time (e.g., ninety-seconds), before automatically determining that ingestible device 100 has entered at least the stomach (e.g., stomach 306 (FIG. 3)).

[1039] In some embodiments, the ingestible device (e.g., ingestible device 100, 300, or 400) may also determine it has entered the stomach based on measurements of pH or temperature. For example, ingestible device 100 may be configured to determine that it has entered the stomach if a temperature of ingestible device has increased to at least 31 degrees Celsius (i.e., consistent with the temperature inside the stomach), or if a measured pH of the environment surrounding ingestible device 100 is sufficiently acidic (i.e., consistent with the acidic nature of gastric juices that may be found inside the stomach).

[1040] At 508, the ingestible device (e.g., ingestible device 100, 300, or 400) stores data indicating the ingestible device has entered the stomach (e.g., stomach 306 (FIG. 3)). For example, after having waited a sufficient amount of time at 506, ingestible device 100 may store data (e.g., within storage circuitry of PCB 120 (FIG. 2)) indicative of ingestible device 100 having entered at least the stomach. Once ingestible device 100 reaches at least the stomach, process 500 proceeds to 510 where ingestible device 100 may be configured to gather data to detect entry into the duodenum (e.g., duodenum 310 (FIG. 3)).

[1041] In some embodiments, process 500 may also simultaneously proceed from 508 to 520, where ingestible device 100 may be configured to gather data in order to detect muscle contractions and detect entry into the jejunum (e.g., jejunum 314 (FIG. 3)). In some embodiments, ingestible device 100 may be configured to simultaneously monitor for entry into the duodenum at 516-518, as well as detect for entry into the jejunum at 520-524. This may allow ingestible device 100 to determine when it has entered the jejunum (e.g., as a result of detecting muscle contractions), even when it fails to first detect entry into the duodenum (e.g., as a result of very quick transit times of the ingestible device through the duodenum).

[1042] At 510, the ingestible device (e.g., ingestible device 100, 300, or 400) gathers measurements of green and blue reflectance levels (e.g., through the use of illuminator 124 and detector 122 of sensing sub-unit 126 (FIG. 2)) while in the stomach (e.g., stomach 306 (FIG. 3)). For example, ingestible device 100 may be configured to periodically gather measurements of green and blue reflectance levels while in the stomach. For instance, ingestible device 100 may be configured to transmit a green illumination and a blue illumination (e.g., via illuminator 124 (FIG. 2)) every five to fifteen seconds, and measure the resulting reflectance (e.g., via detector 122 (FIG. 2)). Every time that ingestible device 100 gathers a new set of measurements, the measurements may be added to a stored data set (e.g., stored within memory circuitry of PCB 120 (FIG. 2)). The ingestible device 100 may then use this data set to determine whether or not ingestible device 100 is still within a stomach (e.g., stomach 306 (FIG. 3)), or a duodenum (e.g., duodenum 310 (FIG. 3)).

[1043] In some embodiments, the ingestible device (e.g., ingestible device 100, 300, or 400) may be configured to detect a first reflectance based on generating an illumination of a first wavelength in approximately the green spectrum of light (between 495-600 nm), and detecting a second reflectance based on generating an illumination of the second wavelength in approximately the blue spectrum of light (between 400-495 nm). In some embodiments, the ingestible device may ensure that the illumination in the green spectrum and the illumination in the blue spectrum have wavelengths separated by at least 50 nm. This may enable ingestible device 100 to sufficiently distinguish between the two wavelengths when detecting the reflectances (e.g., via detector 122 (FIG. 2)). It is understood that the separation of 50 nm is intended to be illustrative, and not limiting, and depending on the accuracy of the detectors within ingestible device 100, smaller separations may be possible to be used.

[1044] At 512, the ingestible device (e.g., ingestible device 100, 300, or 400) determines (e.g., using control circuitry within PCB 120 (FIG. 2)) whether the ingestible device has detected a transition from the stomach (e.g., stomach 306 (FIG. 3)) to a duodenum (e.g., duodenum 310 (FIG. 3)) based on a ratio of green and blue (G/B) reflectance levels. For example, ingestible device 100 may obtain (e.g., from memory circuitry of PCB 120 (FIG. 2)) a data set containing historical data for the respective ratio of the green reflectance to the blue reflectance as measured at a respective time. Generally speaking, a duodenum (e.g., duodenum 310 (FIG. 3)) of a human subject reflects a higher ratio of green light to blue light, as compared to the ratio of green light to blue light that is reflected by a stomach (e.g., stomach 306 (FIG. 3)). Based on this, ingestible device 100 may be configured to take a first set of ratios from the data set, representing the result of recent measurements, and compare them to a second set of ratios from the data set, representing the results of past measurements. When the ingestible device 100 determines that the mean value of the first set of ratios is substantially larger than the mean value of the second set of ratios (i.e., that the ratio of reflected green light to reflected blue light has increased), the ingestible device 100 may determine that it has entered the duodenum (e.g., duodenum 310 (FIG. 3)) from the stomach (e.g., stomach 306 (FIG. 3)). If the ingestible device 100 detects a transition from the stomach (e.g., stomach 306 (FIG. 3)) to a duodenum (e.g., duodenum 310 (FIG. 3)), process 500 proceeds to 514, where ingestible device 100 stores data indicating that the ingestible device 100 has entered the duodenum (e.g., duodenum 310 (FIG. 3)). Alternatively, if the ingestible device determines that the ingestible device has not transitioned from the stomach (e.g., stomach 306 (FIG. 3)) to the duodenum (e.g., duodenum 310 (FIG. 3)), process 500 proceeds back to 510 to gather more measurements of green and blue reflectance levels while still in the stomach (e.g., stomach 306 (FIG. 3)). An example procedure for using measurements of green and blue reflectances to monitor for transitions between the stomach and the duodenum is discussed in greater detail in relation to FIG. 6.

[1045] In some embodiments, the first time that ingestible device 100 detects a transition from the stomach (e.g., stomach 306 (FIG. 3)) to the duodenum (e.g., duodenum 310 (FIG. 3)), ingestible device 100 may be configured to take a mean of the second set of data, (e.g., the set of data previously recorded while in stomach 306 (FIG. 3)) and store this as a typical ratio of green light to blue light detected within the stomach (e.g., stomach 306 (FIG. 3)) (e.g., within memory circuitry of PCB 120 (FIG. 2)). This stored information may later be used by ingestible device 100 to determine when ingestible device 100 re-enters the stomach (e.g., stomach 306 (FIG. 3)) from the duodenum (e.g., duodenum 310 (FIG. 3)) as a result of a reverse pyloric transition.

[1046] At 514, the ingestible device (e.g., ingestible device 100, 300, or 400) stores data indicating that the ingestible device has entered the duodenum (e.g., duodenum 310 (FIG. 3)). For example, ingestible device 100 may store a flag within local memory (e.g., memory circuitry of PCB 120) indicating that the ingestible device 100 is currently in the duodenum. In some embodiments, the ingestible device 100 may also store a timestamp indicating the time when ingestible device 100 entered the duodenum. Once ingestible device 100 reaches the duodenum, process 500 proceeds to 520 where ingestible device 100 may be configured to gather data in order to detect muscle contractions and detect entry into the jejunum (e.g., jejunum 314 (FIG. 3)). Process 500 also proceeds from 514 to 516, where ingestible device 100 may be configured to gather data additional data in order to detect re-entry into the stomach (e.g., stomach 306 (FIG. 3)) from the duodenum (e.g., duodenum 310 (FIG. 3)).

[1047] At 516, the ingestible device (e.g., ingestible device 100, 300, or 400) gathers measurements (e.g., via sensing sub-unit 126 (FIG. 2)) of green and blue reflectance levels while in the duodenum (e.g., duodenum 310 (FIG. 3)). For example, ingestible device 100 may be configured to periodically gather measurements (e.g., via sensing sub-unit 126 (FIG. 2)) of green and blue reflectance levels while in the duodenum, similar to the measurements made at 510 while in the stomach. For instance, ingestible device 100 may be configured to transmit a green illumination and a blue illumination (e.g., via illuminator 124 (FIG. 2)) every five to fifteen seconds, and measure the resulting reflectance (e.g., via detector 122 (FIG. 2)). Every time that ingestible device 100 gathers a new set of measurements, the measurements may be added to a stored data set (e.g., stored within memory circuitry of PCB 120 (FIG. 2)). The ingestible device 100 may then use this data set to determine whether or not ingestible device 100 is still within the duodenum (e.g., duodenum 310 (FIG. 3)), or if the ingestible device 100 has transitioned back into the stomach (e.g., stomach 306 (FIG. 3)).

[1048] At 518, the ingestible device (e.g., ingestible device 100, 300, or 400) determines a transition from the duodenum (e.g., duodenum 310 (FIG. 3)) to the stomach (e.g., stomach 306 (FIG. 3)) based on a ratio of the measured green reflectance levels to the measured blue reflectance levels. In some embodiments, ingestible device 100 may compare the ratio of the measured green reflectance levels to the measured blue reflectance levels recently gathered by ingestible device 100 (e.g., measurements gathered at 516), and determine whether or not the ratio of the measured green reflectance levels to the measured blue reflectance levels is similar to the average ratio of the measured green reflectance levels to the measured blue reflectance levels seen in the stomach (e.g., stomach 306 (FIG. 3)). For instance, ingestible device 100 may retrieve data (e.g., from memory circuitry of PCB 120 (FIG. 2)) indicative of the average ratio of the measured green reflectance levels to the measured blue reflectance levels seen in the stomach, and determine that ingestible device 100 has transitioned back to the stomach if the recently measured ratio of the measured green reflectance levels to the measured blue reflectance levels is sufficiently similar to the average level in the stomach (e.g., within 20% of the average ratio of the measured green reflectance levels to the measured blue reflectance levels seen in the stomach, or within any other suitable threshold level). If the ingestible device detects a transition from the duodenum (e.g., duodenum 310 (FIG. 3)) to the stomach (e.g., stomach 306 (FIG. 3)), process 500 proceeds to 508 to store data indicating the ingestible device has entered the stomach (e.g., stomach 306 (FIG. 3)), and continues to monitor for further transitions. Alternatively, if the ingestible device does not detect a transition from the duodenum (e.g., duodenum 310 (FIG. 3)) to the stomach (e.g., stomach 306 (FIG. 3)), process 500 proceeds to 516 to gather additional measurements of green and blue reflectance levels while in the duodenum (e.g., duodenum 310 (FIG. 3)), which may be used to continuously monitor for possible transitions back into the stomach. An example procedure for using measurements of green and blue reflectances to monitor for transitions between the stomach and the duodenum is discussed in greater detail in relation to FIG. 6.

[1049] At 520, the ingestible device (e.g., ingestible device 100, 300, or 400) gathers periodic measurements of the reflectance levels (e.g., via sensing sub-unit 126 (FIG. 2)) while in the duodenum (e.g., duodenum 310 (FIG. 3)). In some embodiments, the ingestible device (e.g., ingestible device 100, 300, or 400) may gather similar periodic measurements while in the stomach as well. In some embodiments, these periodic measurements may enable ingestible device 100 to detect muscle contractions (e.g., muscle contractions due to a peristaltic wave as discussed in relation to FIG. 4), which may be indicative of entry into a jejunum (e.g., jejunum 314 (FIG. 3)). Ingestible device 100 may be configured to gather periodic measurements using any suitable wavelength of illumination (e.g., by generating illumination using illuminator 124, and detecting the resulting reflectance using detector 122 (FIG. 2)), or combinations of wavelengths of illumination. For example, in some embodiments, ingestible device 100 may be configured to generate red, green, and blue illumination, store separate data sets indicative of red, green, and blue illumination, and analyze each of the data sets separately to search for frequency components in the recorded data indicative of detected muscle contractions. In some embodiments, the measurements gathered by ingestible device 100 at 520 may be sufficiently fast as to detect peristaltic waves in a subject. For instance, in a healthy human subject, peristaltic waves may occur at a rate of approximately 0.1 Hz to 0.2 Hz. Therefore, the ingestible device 400 may be configured to generate illumination and measure the resulting reflectance at least once every 2.5 seconds (i.e., the minimum rate necessary to detect a 0.2 Hz signal), and preferably at a higher rate, such as once every 0.5 seconds or faster, and store values indicative of the resulting reflectances in a data set (e.g., within memory circuitry of PCB 120 (FIG. 2)). After gathering additional data (e.g., after gathering one new data point, or a predetermined number of new data points), process 500 proceeds to 522, where ingestible device 100 determines whether or not a muscle contraction has been detected.

[1050] At 522, the ingestible device (e.g., ingestible device 100, 300, or 400) determines (e.g., via control circuitry within PCB 120 (FIG. 0.2)) whether the ingestible device detects a muscle contraction based on the measurements of reflectance levels (e.g., as gathered by sensing sub-unit 126 (FIG. 2)). For example, ingestible device 100 may obtain a fixed amount of data stored as a result of measurements made at 520 (e.g., retrieve the past minute of data from memory circuitry within PCB 120 (FIG. 2)). Ingestible device 100 may then convert the obtained data into the frequency domain, and search for peaks in a frequency range that would be consistent with peristaltic waves. For example, in a healthy human subject, peristaltic waves may occur at a rate of approximately 0.1 Hz to 0.2 Hz, and an ingestible device 100 may be configured to search for peaks in the frequency domain representation of the data between 0.1 Hz and 0.2 Hz above a threshold value. If the ingestible device 100 detects a contraction based on the reflectance levels (e.g., based on detecting peaks in the frequency domain representation of the data between 0.1 Hz and 0.2 Hz), process 500 proceeds to 524 to store data indicating that the device has entered the jejunum. Alternatively, if the ingestible device 100 does not detect a muscle contraction, process 500 proceeds to 520 to gather periodic measurements of the reflectance levels while in the duodenum (e.g., duodenum 310 (FIG. 3)). In some embodiments, the ingestible device (e.g., ingestible device 100, 300, or 400) may store data (e.g., within memory circuitry of PCB 120 (FIG. 2)) indicating that a muscle contraction was detected, and process 500 will not proceed from 522 to 524 until a sufficient number of muscle contractions have been detected.

[1051] At 524, the ingestible device (e.g., ingestible device 100, 300, or 400) stores data (e.g., within memory circuitry of PCB 120 (FIG. 2)) indicating that the device has entered the jejunum (e.g., jejunum 314 (FIG. 3)). For example, in response to detecting that muscle contraction has occurred at 522, ingestible device 100 may determine that it has entered the jejunum 314, and is no longer inside of the duodenum (e.g., duodenum 310 (FIG. 3)) or the stomach (e.g., stomach 306 (FIG. 3)). In some embodiments, the ingestible device 100 may continue to measure muscle contractions while in the jejunum, and may store data indicative of the frequency, number, or strength of the muscle contractions over time (e.g., within memory circuitry of PCB 120 (FIG. 2)). In some embodiments, the ingestible device 100 may also be configured to monitor for one or more transitions. Such transitions can include a transition from the jejunum to the ileum, an ileoceacal transition from the ileum to the cecum, a transition from the cecum to the colon, or detect exit from the body (e.g., by measuring reflectances, temperature, or levels of ambient light).

[1052] In some embodiments, the ingestible device (e.g., ingestible device 100, 300, or 400) may also determine that it has entered the jejunum (e.g., jejunum 314 (FIG. 3)) after a pre-determined amount of time has passed after having detected entry into the duodenum (e.g., duodenum 310 (FIG. 3)). For example, barring a reverse pyloric transition from the duodenum (e.g., duodenum 310 (FIG. 3)) back to the stomach (e.g., stomach 306 (FIG. 3)), the typical transit time for an ingestible device to reach the jejunum from the duodenum in a healthy human subject is less than three minutes. In some embodiments, the ingestible device (e.g., ingestible device 100, 300, or 400) may therefore be configured to automatically determine that it has entered the jejunum after spending at least three minutes within the duodenum. This determination may be made separately from the determination made based on measured muscle contractions (e.g., the determination made at 522), and in some embodiments, ingestible device 100 may determine that it has entered the jejunum in response to either detecting muscle contractions, or after three minutes has elapsed from having entered the duodenum (e.g., as determined by storing data at 514 indicative of the time that ingestible device entered the duodenum).

[1053] For illustrative purposes, 512-518 of process 500 describe the ingestible device (e.g., ingestible device 100, 300, or 400) measuring green reflectances and blue reflectances, calculating a ratio of the two reflectances, and using this information to determine when the ingestible device has transitioned between the duodenum and stomach. However, in some embodiments, other wavelengths of light may be used other than green and blue, provided that the wavelengths of light chosen have different reflective properties within the stomach and the duodenum (e.g., as a result of different reflection coefficients of the stomach tissue and the tissue of the duodenum).

[1054] It will be understood that the steps and descriptions of the flowcharts of this disclosure, including FIG. 5, are merely illustrative. Any of the steps and descriptions of the flowcharts, including FIG. 5, may be modified, omitted, rearranged, and performed in alternate orders or in parallel, two or more of the steps may be combined, or any additional steps may be added, without departing from the scope of the present disclosure. For example, the ingestible device 100 may calculate the mean and the standard deviation of multiple data sets in parallel in order to speed up the overall computation time. As another example, ingestible device 100 may gather data periodic measurements and detect possible muscle contractions (e.g., at 520-522) while simultaneously gathering green and blue reflectance levels to determine transitions to and from the stomach and duodenum (e.g., at 510-518). Furthermore, it should be noted that the steps and descriptions of FIG. 5 may be combined with any other system, device, or method described in this application, including processes 600 (FIG. 6) and 900 (FIG. 9), and any of the ingestible devices or systems discussed in this application (e.g., ingestible devices 100, 300, or 400) could be used to perform one or more of the steps in FIG. 5.

[1055] FIG. 6 is a flowchart illustrating some aspects of a process for detecting transitions from a stomach to a duodenum and from a duodenum back to a stomach, which may be used when determining a location of an ingestible device as it transits through a gastrointestinal (GI) tract, in accordance with some embodiments of the disclosure. In some embodiments, process 600 may begin when an ingestible device first detects that it has entered the stomach, and will continue as long as the ingestible device determines that it is within the stomach or the duodenum. In some embodiments, process 600 may only be terminated when an ingestible device determines that it has entered the jejunum, or otherwise progressed past the duodenum and the stomach. Although FIG. 6 may be described in connection with the ingestible device 100 for illustrative purposes, this is not intended to be limiting, and either portions or the entirety of the duodenum detection process 600 described in FIG. 6 may be applied to any device discussed in this application (e.g., the ingestible devices 100, 300, or 400), and any of the ingestible devices may be used to perform one or more parts of the process described in FIG. 6. Furthermore, the features of FIG. 6 may be combined with any other systems, methods or processes described in this application. For example, portions of the process described by the process in FIG. 6 may be integrated into process 500 discussed in relation to FIG. 5.

[1056] At 602, the ingestible device (e.g., ingestible device 100, 300, or 400) retrieves a data set (e.g., from memory circuitry within PCB 120 (FIG. 2)) with ratios of the measured green reflectance levels to the measured blue reflectance levels over time. For example, ingestible device 100 may retrieve a data set from PCB 120 containing recently recorded ratios of the measured green reflectance levels to the measured blue reflectance levels (e.g., as recorded at 510 or 516 of process 500 (FIG. 5)). In some embodiments, the retrieved data set may include the ratios of the measured green reflectance levels to the measured blue reflectance levels over time. Example plots of data sets of ratios of the measured green reflectance levels to the measured blue reflectance levels are discussed further in relation to FIG. 7 and FIG. 8.

[1057] At 604, the ingestible device (e.g., ingestible device 100, 300, or 400) includes a new measurement (e.g., as made with sensing sub-unit 126 (FIG. 2)) of a ratio of the measured green reflectance level to the measured blue reflectance level in the data set. For example, ingestible device 100 may be configured to occasionally record new data by transmitting green and blue illumination (e.g., via illuminator 124 (FIG. 2)), detecting the amount of reflectance received due to the green and blue illumination (e.g., via detector 122 (FIG. 2)), and storing data indicative of the amount of the received reflectance (e.g., in memory circuitry of PCB 120 (FIG. 2)). The ingestible device 100 may be configured to record new data every five to fifteen seconds, or at any other convenient interval of time. For illustrative purposes, ingestible device 100 is described as storing and retrieving the ratio of the measured green reflectance levels to the measured blue reflectance levels (e.g., if the amount of detected green reflectance was identical to the amount of detected blue reflectance at a given time, the ratio of the green and blue reflectances would be “1.0” at that given time); however, it is understood that the green reflectance data and the blue reflectance data may be stored separately within the memory of ingestible device 100 (e.g., stored as two separate data sets within memory circuitry of PCB 120 (FIG. 2)).

[1058] At 606, the ingestible device (e.g., ingestible device 100, 300, or 400) retrieves a first subset of recent data by applying a first sliding window filter to the data set. For example, ingestible device 100 may use a sliding window filter to obtain a predetermined amount of the most recent data within the data set, which may include any new values of the ratio of the measured green reflectance level to the measured blue reflectance level obtained at 604. For instance, the ingestible device may be configured to select between ten and forty data points from the data set, or ingestible device 100 may be configured to select a predetermined range of data values between fifteen seconds of data and five minutes of data. In some embodiments, other ranges of data may be selected, depending on how frequently measurements are recorded, and the particular application at hand. For instance, any suitable amount of data may be selected in the sliding window, provided that it is sufficient to detect statistically significant differences between the data selected in a second sliding window (e.g., the second subset of data selected at 614).

[1059] In some embodiments, the ingestible device (e.g., ingestible device 100, 300, or 400) may also be configured to remove outliers from the data set, or to smooth out unwanted noise in the data set. For example, ingestible device 100 may select the first subset of data, or any other subset of data, by first obtaining a raw set of values by applying a window filter to the data set (e.g., selecting a particular range of data to be included). Ingestible device 100 may then be configured to identify outliers in the raw set of values; for instance, by identifying data points that are over three standard deviations away from the mean value of the raw set of values, or any other suitable threshold. Ingestible device 100 may then determine the subset of data by removing outliers from the raw set of values. This may enable ingestible device 100 to avoid spurious information when determining whether or not it is located within the stomach or the duodenum.

[1060] At 608, the ingestible device (e.g., ingestible device 100, 300, or 400) determines whether the most recently detected location was the duodenum (e.g., duodenum 310 (FIG. 3)). In some embodiments, ingestible device 100 may store a data flag (e.g., within memory circuitry of PCB 120 (FIG. 2)) indicating the most recent portion of the GI tract that the ingestible device 100 detected itself to be within. For instance, every time ingestible device 100 detects entry to the stomach (e.g., detects entry into stomach 306 (FIG. 3) as a result of the decision made at 610), a flag is stored in memory indicating the ingestible device 100 is in the stomach (e.g., as part of storing data at 612). If ingestible device 100 subsequently detects entry into the duodenum (e.g., detects entry into duodenum 310 (FIG. 3) as a result of a decision made at 624), another different flag is stored in memory indicating that the ingestible device 100 is in the duodenum (e.g., as part of storing data at 624). In this case, ingestible device 100 may retrieve the most recently stored flag at 608, and determine whether or not the flag indicates that the ingestible device 100 was most recently within the duodenum. If ingestible device 100 detects that it was most recently in the duodenum, process 600 proceeds to 610 where the ingestible device compares the recent measurements of the ratios of the measured green reflectance levels to the measured blue reflectance levels (e.g., measurements that include the recent measurement made at 606) to the typical ratios measured within the stomach, and uses this information to determine whether a reverse pyloric transition from the duodenum back to the stomach has occurred. Alternately, if ingestible device 100 detects that it was not most recently in the duodenum (e.g., because it was in the stomach instead), process 600 proceeds to 614 where the ingestible device compares the recent measurements of the ratios of the measured green reflectance levels to the measured blue reflectance levels (e.g., measurements that include the recent measurement made at 606) to past measurements, and uses this information to determine whether a pyloric transition from the stomach to the duodenum has occurred.

[1061] Process 600 proceeds from 608 to 610 when the ingestible device determined that it was most recently in the duodenum. At 610, the ingestible device (e.g., ingestible device 100, 300, or 400) determines (e.g., via control circuitry within PCB 120 (FIG. 2)) whether the current G/B signal is similar to a recorded average G/B signal in the stomach. For example, ingestible device 100 may be configured to have previously stored data (e.g., within memory circuitry of PCB 120 (FIG. 2)) indicative of the average ratio of the measured green reflectance levels to the measured blue reflectance levels measured in the stomach. Ingestible device 100 may then retrieve this stored data indicative of the average ratio of the measured green reflectance levels to the measured blue reflectance levels in the stomach, and compare this against the recent measurements in order to determine whether or not ingestible device 100 has returned back to the stomach from the duodenum. For instance, ingestible device 100 may determine if the mean value of the first subset of recent data (i.e., the average value of the recently measured ratios of the measured green reflectance levels to the measured blue reflectance levels) is less than the average ratio of the measured green reflectance levels to the measured blue reflectance levels within the stomach, or less that the average ratio measured within the stomach plus a predetermined number times the standard deviation of the ratios measured within the stomach. For instance, if the average ratio of the measured green reflectance levels to the measured blue reflectance levels in the stomach was “1,” with a standard deviation of “0.2,” ingestible device 100 may determine whether or not the mean value of the first subset of data is less than “1.0+k*0.2,” where “k” is a number between zero and five. It is understood that, in some embodiments, the ingestible device 100 may be configured to use a different threshold level to determine whether or not the mean value of the first subset of recent data is sufficiently similar to the average ratio of the measured green reflectance levels to the measured blue reflectance levels within the stomach. In response to determining that the recent ratio of the measured green reflectance levels to the measured blue reflectance levels is similar to the average ratio of measured green and blue reflectance levels seen in the stomach, process 600 proceeds to 612 where ingestible device 100 stores data indicating that it has re-entered the stomach from the duodenum. Alternately, in response to determining that the recent ratio of measured green and blue reflectance levels is sufficiently different from the average ratio of measured green and blue reflectance levels seen in the stomach, ingestible device 100 proceeds directly to 604, and continues to obtain new data on an ongoing basis.

[1062] At 612, the ingestible device (e.g., ingestible device 100, 300, or 400) stores data indicating a reverse pyloric transition from the duodenum to the stomach was detected. For example ingestible device 100 may store a data flag (e.g., within memory circuitry of PCB 120 (FIG. 2)) indicating that the ingestible device 100 most recently detected itself to be within the stomach portion of the GI tract (e.g., stomach 306 (FIG. 3)). In some embodiments, ingestible device 100 may also store data (e.g., within memory circuitry of PCB 120 (FIG. 2)) indicating a time that ingestible device 100 detected the reverse pyloric transition from the duodenum to the stomach. This information may be used by ingestible device 100 at 608, and as a result process 600 may proceed from 608 to 614, rather than proceeding from 618 to 610. After ingestible device 100 stores the data indicating a reverse pyloric transition from the duodenum to the stomach was detected, process 600 proceeds to 604 where ingestible device 100 continues to gather additional measurements, and continues to monitor for further transitions between the stomach and the duodenum.

[1063] Process 600 proceeds from 608 to 614 when the ingestible device determined that it was not most recently in the duodenum (e.g., as a result of having most recently been in the stomach instead). At 614, the ingestible device (e.g., ingestible device 100, 300, or 400) retrieves a second subset of previous data by applying a second sliding window filter to the data set. For example, ingestible device 100 may use a sliding window filter to obtain a predetermined amount of older data from a past time range, which may be separated from recent time range used to select the first subset of data gathered at 606 by a predetermined period of time. In some embodiments, any suitable amount of data may be selected by the first and second window filters, and the first and second window filters may be separated by any appropriate predetermined amount of time. For example, in some embodiments, the first window filter and the second window filter may each be configured to select a predetermined range of data values from the data set, the predetermined range being between fifteen seconds of data and five minutes of data. In some embodiments, the recent measurements and the past measurements may then be separated by a predetermined period of time that is between one to five times the predetermined range of data values. For instance, ingestible device 100 may select the first subset of data and the second subset of data to each be one minute of data selected from the dataset (i.e., selected to have a predetermined range of one minute), and the first subset of data and the second subset of data are selected from recorded measurements that are at least two minutes apart (i.e., the predetermined period of time is two minutes, which is twice the range used to select the subsets of data using the window filters). As another example, ingestible device 100 may select the first subset of data and the second subset of data to each be five minutes of data selected from the dataset (i.e., selected to have a predetermined range of five minutes), and the first subset of data and the second subset of data are selected from recorded measurements that are at least 10 minutes apart (i.e., the predetermined period of time is two minutes, which is twice the range used to select the subsets of data using the window filters).

[1064] In some embodiments, if ingestible device 100 recently transitioned to the stomach from the duodenum (e.g., as determined by checking for recent data stored within ingestible device 100 at 612), ingestible device 100 may select the second subset of data at 614 from a time frame when ingestible device 100 is known to be within the stomach. In some embodiments, ingestible device 100 may alternately select a previously recorded average and standard deviation for ratios of green reflectances and blue reflectances within the stomach (e.g., an average and standard deviation typical of data recorded within the stomach, as previously recorded within memory circuitry of PCB 120 at 620) in place of the second subset of data. In this case, ingestible device 100 may simply use the previously recorded average and previously recorded standard deviation when making a determination at 616, rather than expending resources to calculate the mean and standard deviation of the second subset.

[1065] At 616, the ingestible device (e.g., ingestible device 100, 300, or 400) determines whether the difference between the mean of the second subset and the mean of the first subset is greater than a predetermined multiple of the standard deviation of the first subset. For example, ingestible device 100 may compute a difference between a mean of the first subset of recent data and a mean of a second subset of past data, and determine whether this difference is greater than three times the standard deviation of the second subset of past data. In some embodiments, it is understood that any convenient threshold level may be used other than three times the standard deviation, such as any value between one and five times the standard deviation. Also, in some embodiments, the ingestible device may instead set the threshold level based on the standard deviation of the second subset instead of the first subset. In response to determining that the difference between the mean of the first subset and the mean of the second subset is greater than a predetermined multiple of the standard deviation of the second subset, process 600 proceeds to 618. Otherwise, process 600 proceeds back to 604, where the ingestible device 604 continues to gather new data to be used in monitoring for transitions between the stomach (e.g., stomach 306 (FIG. 3)) and the duodenum (e.g., duodenum 310 (FIG. 3)).

[1066] At 618, the ingestible device (e.g., ingestible device 100, 300, or 400) determines (e.g., via control circuitry within PCB 120 (FIG. 2)) whether the determination made at 616 is the first time that the difference between the mean of the first subset of recent data and the mean of the second subset of past data is calculated to be greater than the standard deviation of the second subset. If the ingestible device determines that this is the first time that the difference between the mean of the first subset and the mean of the second subset is calculated to be greater than the standard deviation of the second subset, process 600 proceeds to 620 to store the mean of the second subset of past data as an average G/B signal in the stomach. Alternatively, if the ingestible device determines that the immediately preceding determination made at 616 is not the first time that the difference between the mean of the first subset of recent data and the mean of the second subset of past data is calculated to be greater than the standard deviation of the second subset, process 600 proceeds directly to 622.

[1067] At 620, the ingestible device (e.g., ingestible device 100, 300, or 400) stores the mean of the second subset as an average G/B signal in the stomach. For example, ingestible device 100 may be configured to store the mean of the second subset of past data (e.g., store within memory circuitry of PCB 120 (FIG. 2)) as the average ratio of the measured green reflectance levels to the measured blue reflectance levels measured in the stomach. In some embodiments, ingestible device 100 may also store the standard deviation of the second subset of past data as a typical standard deviation of the ratios of the measured green reflectance levels to the measured blue reflectance levels detected within the stomach. This stored information may be used by the ingestible device later on (e.g., at 610) to compare against future data, which may enable the ingestible device to detect reverse pyloric transitions from the duodenum (e.g., duodenum 310 (FIG. 3)) back to the stomach (e.g., stomach 306 (FIG. 3)), and may generally be used in place of other experimental data gathered from the stomach (e.g., in place of the second subset of data at 616). After storing the mean of the second subset as an average G/B signal in the stomach, process 600 proceeds to 622.

[1068] At 622, the ingestible device (e.g., ingestible device 100, 300, or 400) determines whether a difference of the mean of the first subset of recent data to the mean of the second subset of past data is greater than a predetermined threshold, “M”. In some embodiments, the predetermined threshold, “M,” will be sufficiently large to ensure that the mean of the first subset is substantially larger than the mean of the second subset, and may enable ingestible device 100 to ensure that it detected an actual transition to the duodenum. This may be particularly advantageous when the determination made at 616 is potentially unreliable due to the standard deviation of the second subset of past data being abnormally small. For example, a typical value of the predetermined threshold “M,” may be on the order of 0.1 to 0.5. If ingestible device 100 determines that the difference of the mean of the first subset of recent data to the second subset of past data is greater than a predetermined threshold, process 600 proceeds to 624 to store data indicating that a pyloric transition from the stomach to the duodenum (e.g., from stomach 306 to duodenum 310 (FIG. 3)) was detected. Alternatively, if the ingestible device determines that the ratio of the mean of the first subset to the second subset is less than or equal to the predetermined threshold, “M” (i.e., determines that a transition to the duodenum has not occurred), process 600 proceeds directly to 604 where ingestible device 100 continues to make new measurements and monitor for possible transitions between the stomach and the duodenum.

[1069] In some embodiments, instead of using a difference of the mean of the first subset of recent data to the mean of the second subset of past data, the ingestible device (e.g., ingestible device 100, 300, or 400) determines whether the ratio of the mean of the first subset of recent data to the mean of the second subset of past data is greater than a predetermined threshold, “M”. In some embodiments, the predetermined threshold, “M,” will be sufficiently large to ensure that the mean of the first subset is substantially larger than the mean of the second subset, and may enable ingestible device 100 to ensure that it detected an actual transition to the duodenum. This may be particularly advantageous when the determination made at 616 is potentially unreliable due to the standard deviation of the second subset of past data being abnormally small. For example, a typical value of the predetermined threshold “M,” may be on the order of 1.2 to 2.0. It is understood any convenient type of threshold or calculation may be used to determine whether or not the first subset of data and the second subset of data are both statistically distinct from one another, and also substantially different from one another in terms of overall average value.

[1070] At 624, the ingestible device (e.g., ingestible device 100, 300, or 400) stores data indicating a pyloric transition from the stomach to the duodenum was detected. For example ingestible device 100 may store a data flag (e.g., within memory circuitry of PCB 120 (FIG. 2)) indicating that the ingestible device 100 most recently detected itself to be within the duodenum portion of the GI tract (e.g., duodenum 310 (FIG. 3)). In some embodiments, ingestible device 100 may also store data (e.g., within memory circuitry of PCB 120 (FIG. 2)) indicating a time that ingestible device 100 detected the pyloric transition from the stomach to the duodenum. This information may be used by ingestible device 100 at 608, and as a result process 600 may proceed from 608 to 610, rather than proceeding from 618 to 614. After ingestible device 100 stores the data indicating a pyloric transition from the stomach to the duodenum was detected, process 600 proceeds to 604 where ingestible device 100 continues to gather additional measurements, and continues to monitor for further transitions between the stomach and the duodenum.

[1071] It will be understood that the steps and descriptions of the flowcharts of this disclosure, including FIG. 6, are merely illustrative. Any of the steps and descriptions of the flowcharts, including FIG. 6, may be modified, omitted, rearranged, and performed in alternate orders or in parallel, two or more of the steps may be combined, or any additional steps may be added, without departing from the scope of the present disclosure. For example, the ingestible device 100 may calculate the mean and the standard deviation of multiple data sets in parallel in order to speed up the overall computation time. Furthermore, it should be noted that the steps and descriptions of FIG. 6 may be combined with any other system, device, or method described in this application, and any of the ingestible devices or systems discussed in this application could be used to perform one or more of the steps in FIG. 6. For example, portions of process 600 may be incorporated into 508-516 of process 500 (FIG. 5), and may be part of a more general process for determining a location of the ingestible device. As another example, the ratio of detected blue and green light (e.g., as measured and added to the data set at 604) may continue even outside of the stomach or duodenum, and similar information may be recorded by the ingestible device throughout its transit in the GI tract. Example plots of data sets of ratios of measured green and blue reflectance levels, which may be gathered throughout the GI tract, are discussed further in relation to FIG. 7 and FIG. 8 below.

[1072] FIG. 7 is a plot illustrating data collected during an example operation of an ingestible device (e.g., ingestible device 100, 300, or 400), which may be used when determining a location of an ingestible device as it transits through a gastrointestinal (GI) tract, in accordance with some embodiments of the disclosure.

Although FIG. 7 may be described in connection with ingestible device 100 for illustrative purposes, this is not intended to be limiting, and plot 700 and data set 702 may be typical of data gathered by any device discussed in this application. Plot 700 depicts the ratios of the measured green reflectance levels to the measured blue reflectance levels over time. For example, ingestible device 100 may have computed the value for each point in the data set 702 by transmitting green and blue illumination at a given time (e.g., via illuminator 124 (FIG. 2)), measuring the resulting green and blue reflectances (e.g., via detector 122 (FIG. 2)), calculating the ratio of the resulting reflectances, and storing the ratio in the data set along with a timestamp indicating the time that the reflectances were gathered.

[1073] At 704, shortly after ingestible device 100 begins operation, ingestible device 100 determines that it has reached at least the stomach (e.g., as a result of making a determination similar to the determination discussed in relation to 506 in process 500 (FIG. 5)). Ingestible device 100 continues to gather additional measurements of green and blue reflectance levels, and at 706 ingestible device 100 determines that a pyloric transition has occurred from the stomach to the duodenum (e.g., as a result of making a determination similar to the determinations discussed in relation to 616-624 of process 600 (FIG. 6)). Notably, the values in data set 702 around 706 jump up precipitously, which is indicative of the higher ratios of measured green reflectance levels to measured blue reflectance levels typical of the duodenum.

[1074] The remainder of the data set 702 depicts the ratios of the measured green reflectance levels to the measured blue reflectance levels throughout the remainder of the GI tract. At 708, ingestible device 100 has reached the jejunum (e.g., as determined through measurements of muscle contractions, as discussed in relation to FIG. 9), and by 710, ingestible device 100 has reached the cecum. It is understood that, in some embodiments, the overall character and appearance of data set 702 changes within the small intestine (i.e., the duodenum, jejunum, and ileum) versus the cecum. Within the jejunum and ileum, there may typically be a wide variation in the ratios of the measured green reflectance levels to the measured blue reflectance levels, resulting in relatively noisy data with a high standard deviation. By comparison, within the cecum ingestible device 100 may measure a relatively stable ratio of the measured green reflectance levels to the measured blue reflectance levels. In some embodiments, ingestible device 100 may be configured to determine transitions from the small intestine to the cecum based on these differences. For example, ingestible device 100 may compare recent windows of data to past windows of data, and detect a transition to the cecum in response to determining that the standard deviation of the ratios in the recent window of data is substantially less than the standard deviation of the ratios in the past window of data.

[1075] FIG. 8 is another plot illustrating data collected during an example operation of an ingestible device, which may be used when determining a location of an ingestible device as it transits through a gastrointestinal (GI) tract, in accordance with some embodiments of the disclosure. Similar to FIG. 7, FIG. 8 may be described in connection with the ingestible device 100 for illustrative purposes. However, this is not intended to be limiting, and plot 800 and data set 802 may be typical of data gathered by any device discussed in this application.

[1076] At 804, shortly after ingestible device 100 begins operation, ingestible device 100 determines that it has reached at least the stomach (e.g., as a result of making a determination similar to the determination discussed in relation to 506 in process 500 (FIG. 5)). Ingestible device 100 continues to gather additional measurements of green and blue reflectance levels (e.g., via sensing sub-unit 126 (FIG. 2)), and at 806 ingestible device 100 determines that a pyloric transition has occurred from the stomach to the duodenum (e.g., as a result of making a determination similar to the determinations discussed in relation to 616-624 of process 600 (FIG. 6)). Notably, the values in data set 802 around 806 jump up precipitously, which is indicative of the higher ratios of measured green reflectance levels to measured blue reflectance levels typical of the duodenum, before falling shortly thereafter. As a result of the reduced values in data set 802, ingestible device 100 determines that a reverse pyloric transition has occurred from the duodenum back to the stomach at 808 (e.g., as a result of making a determination similar to the determinations discussed in relation to 610-612 of process 600 (FIG. 6)). At 810, as a result of the values in data set 802 increasing again, ingestible device 100 determines that another pyloric transition has occurred from the stomach to the duodenum, and shortly thereafter ingestible device 100 proceeds onwards to the jejunum, ileum, and cecum.

[1077] The remainder of the data set 802 depicts the ratios of the measured green reflectance levels to the measured blue reflectance levels throughout the remainder of the GI tract. Notably, at 812, ingestible device reaches the transition point between the ileum and the cecum. As discussed above in relation to FIG. 7, the transition to the cecum is marked by a reduced standard deviation in the ratios of measured green reflectances and measured blue reflectances over time, and ingestible device 100 may be configured to detect a transition to the cecum based on determining that the standard deviation of a recent set of measurements is substantially smaller than the standard deviation of past measurements taken from the jejunum or ileum.

[1078] FIG. 9 is a flowchart of illustrative steps for detecting a transition from a duodenum to a jejunum, which may be used when determining a location of an ingestible device as it transits through a gastrointestinal (GI) tract, in accordance with some embodiments of the disclosure. Although FIG. 9 may be described in connection with the ingestible device 100 for illustrative purposes, this is not intended to be limiting, and either portions or the entirety of process 900 described in FIG. 9 may be applied to any device discussed in this application (e.g., the ingestible devices 100, 300, and 400), and any of these ingestible devices may be used to perform one or more parts of the process described in FIG. 9. Furthermore, the features of FIG. 9 may be combined with any other systems, methods or processes described in this application. For example, portions of the process described by the process in FIG. 9 may be integrated into the localization process described by FIG. 5 (e.g., as part of 520-524 of process 500 (FIG. 5)). In some embodiments, an ingestible device 100 may perform process 900 while in the duodenum, or in response to detecting entry to the duodenum. In other embodiments, an ingestible device 100 may perform process 900 while in the stomach, or in response to detecting entry into the GI tract. It is also understood that process 900 may be performed in parallel with any other process described in this disclosure (e.g., process 600 (FIG. 6)), which may enable ingestible device 100 to detect entry into various portions of the GI tract, without necessarily detecting entry into a preceding portion of the GI tract. For illustrative purposes, FIG. 9 may be discussed in terms of ingestible device 100 generating and making determinations based on a single set of reflectance levels generated at a single wavelength by a single sensing sub-unit (e.g., sensing sub-unit 126 (FIG. 2)).

[1079] However, it is understood that ingestible device 100 may generate multiple wavelengths of illumination from multiple different sensing sub-units positioned around the circumference of ingestible device (e.g., multiple sensing sub-units positioned at different locations behind window 114 of ingestible device 100 (FIG. 1), and each of the resulting reflectances may be stored as a separate data set. Moreover, each of these sets of reflectance levels may be used to detect muscle contractions by running multiple versions of process 900, each one of which processes data for a different set of reflectances corresponding to data sets obtained from measurements of different wavelengths or measurements made by different sensing sub-units.

[1080] At 902, the ingestible device (e.g., ingestible device 100, 300, or 400) retrieves a set of reflectance levels. For example, ingestible device 100 may retrieve a data set of previously recorded reflectance levels from memory (e.g., from memory circuitry of PCB 120 (FIG. 2)). Each of the reflectance levels may correspond to reflectances previously detected by ingestible device 100 (e.g., via detector 122 (FIG. 2)) from illumination generated by ingestible device 100 (e.g., via illuminator 124 (FIG. 2)), and may represent a value indicative of an amount of light detected in a given reflectance. However, it is understood that any suitable frequency of light may be used, such as light in the infrared, visible, or ultraviolet spectrums. In some embodiments, the reflectance levels may correspond to reflectances previously detected by ingestible device 100 at periodic intervals.

[1081] At 904, the ingestible device (e.g., ingestible device 100, 300, or 400) includes new measurements of reflectance levels in the data set. For example, ingestible device 100 may be configured to detect a new reflectance (e.g., transmit illumination and detect the resulting reflectance using sensing sub-unit 126 (FIG. 2)) at regular intervals, or with sufficient speed as to detect peristaltic waves. For example, ingestible device 100 may be configured to generate illumination and measure the resulting reflectance once every three seconds (i.e., the minimum rate necessary to detect a 0.17 Hz signal), and preferably at a higher rate, as fast at 0.1 second or even faster. It is understood that the periodic interval between measurements may be adapted as needed based on the species of the subject, and the expected frequency of the peristaltic waves to be measured. Every time ingestible device 100 makes a new reflectance level measurement at 904, the new data is included to the data set (e.g., a data set stored within memory circuitry of PCB 120 (FIG. 2)).

[1082] At 906, the ingestible device (e.g., ingestible device 100, 300, or 400) obtains a first subset of recent data by applying a sliding window filter to the data set. For example, ingestible device 100 may retrieve a one-minute worth of data from the data set. If the data set includes values for reflectances measured every second, this would be approximately 60 data points worth of data. Any suitable type of window size may be used, provided that the size of the window is sufficiently large to detect peristaltic waves (e.g., fluctuations on the order of 0.1 Hz to 0.2 Hz for healthy human subjects). In some embodiments, ingestible device 100 may also clean the data, for example, by removing outliers from the first subset of data obtained through the use of the sliding window filter.

[1083] At 908, the ingestible device (e.g., ingestible device 100, 300, or 400) obtains a second subset of recent data by interpolating the first subset of recent data. For example, ingestible device 100 may interpolate the first subset of data in order to generate a second subset of data with a sufficient number of data points (e.g., data points spaced every 0.5 seconds or greater). In some embodiments, this may enable ingestible device 100 to also replace any outlier data points that may have been removed as part of applying the window filter at 906.

[1084] At 910, the ingestible device (e.g., ingestible device 100, 300, or 400) calculates a normalized frequency spectrum from the second subset of data. For example, ingestible device 100 may be configured to perform a fast Fourier transform to convert the second subset of data from a time domain representation into a frequency domain representation. It is understood that depending on the application being used, and the nature of the subset of data, any number of suitable procedures (e.g., Fourier transform procedures) may be used to determine a frequency spectrum for the second subset of data. For example, the sampling frequency and size of the second subset of data may be known in advance, and ingestible device 100 may be configured to have pre-stored values of a normalized discreet Fourier transform (DFT) matrix, or the rows of the DFT matrix corresponding to the 0.1 Hz to 0.2 Hz frequency components of interest, within memory (e.g., memory circuitry of PCB 120 (FIG. 2)). In this case, the ingestible device may use matrix multiplication between the DFT matrix and the data set to generate an appropriate frequency spectrum. An example data set and corresponding frequency spectrum that may be obtained by the ingestible device is discussed in greater detail in relation to FIG. 10.

[1085] At 912, the ingestible device (e.g., ingestible device 100, 300, or 400) determines whether at least a portion of the normalized frequency spectrum is between 0.1 Hz and 0.2 Hz above a threshold value of 0.5 Hz. Peristaltic waves in a healthy human subject occur at a rate between 0.1 Hz and 0.2 Hz, and an ingestible device experiencing peristaltic waves (e.g., ingestible device 400 detecting contractions in walls 406 of the jejunum (FIG. 4)) may detect sinusoidal variations in the amplitude of detected reflectances levels that follow a similar 0.1 Hz to 0.2 Hz frequency. If the ingestible device determines that a portion of the normalized frequency spectrum between 0.1 Hz and 0.2 Hz is above a threshold value of 0.5, this measurement may be consistent with peristaltic waves in a healthy human subject, and process 900 proceeds to 914 where ingestible device 100 stores data indicating a muscle contraction was detected. Alternatively, if the ingestible device determines that no portion of the normalized frequency spectrum between 0.1 Hz and 0.2 Hz above a threshold value of 0.5, process 900 proceeds directly to 904 to make new measurements and to continue to monitor for new muscle contractions. It is understood that a threshold value other than 0.5 may be used, and that the exact threshold may depend on the sampling frequency and type of frequency spectrum used by ingestible device 100.

[1086] At 914, the ingestible device (e.g., ingestible device 100, 300, or 400) stores data indicating a muscle contraction was detected. For example, ingestible device 100 may store data in memory (e.g., memory circuitry of PCB 120 (FIG. 2)) indicating that a muscle contraction was detected, and indicating the time that the muscle contraction was detected. In some embodiments, ingestible device 100 may also monitor the total number of muscle contractions detected, or the number of muscle contractions detected in a given time frame. In some embodiments, detecting a particular number of muscle contractions may be consistent with ingestible device 100 being within the jejunum (e.g., jejunum 314 (FIG. 3)) of a healthy human subject. After detecting a muscle contraction, process 900 proceeds to 916.

[1087] At 916, the ingestible device (e.g., ingestible device 100, 300, or 400) determines whether a total number of muscle contractions exceeds a predetermined threshold number. For example, ingestible device 100 may retrieve the total number of muscle contractions detected from memory (e.g., from memory circuitry of PCB 120 (FIG. 2)), and compare the total number to a threshold value. In some embodiments, the threshold value may be one, or any number larger than one. The larger the threshold value, the more muscle contractions need to be detected before ingestible device 100 stores data indicating that it has entered the jejunum. In practice, setting the threshold value as three or higher may prevent the ingestible device from detecting false positives (e.g., due to natural movement of the GI tract organs, or due to movement of the subject). If the total number of contractions exceeds the predetermined threshold number, process 900 proceeds to 918 to store data indicating detection of a transition from the duodenum to the jejunum. Alternatively, if the total number of contractions does not exceed a predetermined threshold number, process 900 proceeds to 904 to include new measurements of reflectance levels in the data set. An example plot of the muscle contractions detected over time is discussed in greater detail in relation to FIG. 11.

[1088] At 918, the ingestible device (e.g., ingestible device 100, 300, or 400) stores data indicating detection of a transition from the duodenum to the jejunum. For example, ingestible device 100 may store data in memory (e.g., from memory circuitry of PCB 120 (FIG. 2)) indicating that the jejunum has been reached. In some embodiments, if ingestible device 100 is configured to perform all or part of process 900 while in the stomach, ingestible device 100 may store data at 918 indicating detection of a transition from the stomach directly to the jejunum (e.g., as a result of transitioning too quickly through the duodenum for the pyloric transition to be detected using process 600 (FIG. 6)).

[1089] In some embodiments, the ingestible device (e.g., ingestible device 100, 300, or 400) may be configured to obtain a fluid sample from the environment external to a housing of the ingestible device in response to identifying a change in the location of the ingestible device. For example, ingestible device 100 may be configured to obtain a fluid sample from the environment external to the housing of ingestible device 100 (e.g., through the use of optional opening 116 and optional rotating assembly 118 (FIG. 2)) in response to determining that the ingestible device is located within the jejunum (e.g., jejunum 314 (FIG. 3)). In some embodiments, ingestible device 100 may also be equipped with appropriate diagnostics to detect certain medical conditions based on the retrieved fluid sample, such as small intestinal bacterial overgrowth (SIBO).

[1090] In some embodiments, the ingestible device (e.g., ingestible device 100, 300, or 400) may be configured to deliver a dispensable substance that is pre-stored within the ingestible device from the ingestible device into the gastrointestinal tract in response to identifying the change in the location of the ingestible device. For example, ingestible device 100 may have a dispensable substance pre-stored within the ingestible device 100 (e.g., within a storage chamber or cavity on optional storage sub-unit 118-3 (FIG. 2)), and ingestible device 100 may be configured to dispense the substance into the gastrointestinal tract (e.g., through the use of optional opening 116 and optional rotating assembly 118 (FIG. 2)) when the ingestible device 100 detects that the ingestible device 100 is located within the jejunum (e.g., jejunum 314 (FIG. 3)). In some embodiments, this may enable ingestible device 100 to deliver substances (e.g., therapeutics and medicaments) at targeted locations within the GI tract.

[1091] In some embodiments, the ingestible device (e.g., ingestible device 100, 300, or 400) may be configured to perform an action based on the total number of detected muscle contractions. For example, ingestible device 100 may be configured to retrieve data indicative of the total number of muscle contractions (e.g., from memory circuitry of PCB 120 (FIG. 2)), and compare that to an expected number muscle contractions in a healthy individual. In response, the ingestible device may either dispense a substance into the gastrointestinal tract (e.g., through the use of optional opening 116 and optional rotating assembly 118 (FIG. 2)), or may obtain a fluid sample from the environment external to the housing of ingestible device 100 (e.g., through the use of optional opening 116 and optional rotating assembly 118 (FIG. 2)). For instance, ingestible device 100 may be configured to obtain a sample in response to determining that a number of detected muscle contractions is abnormal, and differs greatly from the expected number. As another example, ingestible device 100 may be configured to deliver a substance into the GI tract (such as a medicament), in response to determining that the detected muscle contractions are consistent with a functioning GI tract in a healthy individual.

[1092] It will be understood that the steps and descriptions of the flowcharts of this disclosure, including FIG. 9, are merely illustrative. Any of the steps and descriptions of the flowcharts, including FIG. 9, may be modified, omitted, rearranged, performed in alternate orders or in parallel, two or more of the steps may be combined, or any additional steps may be added, without departing from the scope of the present disclosure. For example, the ingestible device 100 may calculate the mean and the standard deviation of multiple data sets in parallel (e.g., multiple data sets, each one corresponding to a different wavelength of reflectance or different sensing sub-unit used to detect the reflectance) in order to speed up the overall computation time. Furthermore, it should be noted that the steps and descriptions of FIG. 9 may be combined with any other system, device, or method described in this application, and any of the ingestible devices or systems discussed in this application could be used to perform one or more of the steps in FIG. 9.

[1093] FIG. 10 is a plot illustrating data collected during an example operation of an ingestible device, which may be used when detecting a transition from a duodenum to a jejunum, in accordance with some embodiments of the disclosure. Diagram 1000 depicts a time domain plot 1002 of a data set of reflectance levels measured by an ingestible device (e.g., the second subset of data discussed in relation to 908 of FIG. 9). In some embodiments, ingestible device 100 may be configured to gather data points at semi-regular intervals approximately 0.5 seconds apart. By comparison, diagram 1050 depicts a frequency domain plot 1004 of the same data set of reflectance levels measured by an ingestible device (e.g., as a result of ingestible device 100 calculating a frequency spectrum at 910 of FIG. 9). In some embodiments, ingestible device 100 may be configured to calculate the frequency spectrum through any convenient means.

[1094] In diagram 1050, the range of frequencies 1006 between 0.1 Hz and 0.2 Hz may be the range of frequencies that ingestible device 100 searches in order to detect muscle contractions. As shown in diagram 1050, there is a strong peak in the frequency domain plot 1004 around 0.14 Hz, which is consistent with the frequency of peristaltic motion in a healthy human individual. In this case, an ingestible device 100 analyzing frequency domain plot 1004 may be configured to determine that the data is consistent with a detected muscle contraction (e.g., using a process similar to 912 of process 900 (FIG. 9)), and may store data (e.g., in memory circuitry of PCB 120 (FIG. 2)) indicating that a muscle contraction has been detected. Because the muscle contraction was detected from the one-minute window of data ending at 118 minutes, ingestible device 100 may also store data indicating that the muscle contraction was detected at the 118-minute mark (i.e., which may indicate that the ingestible device 100 was turned on and ingested by the subject 118 minutes ago).

[1095] FIG. 11 is a plot illustrating muscle contractions detected by an ingestible device over time, which may be used when determining a location of an ingestible device as it transits through a gastrointestinal (GI) tract, in accordance with some embodiments of the disclosure. In some embodiments, ingestible device 100 may be configured to detect muscle contractions, and store data indicative of when each muscle contraction is detected (e.g., as part of 914 of process 900 (FIG. 9)). Plot 1100 depicts the detected muscle contractions 1106 over time, with each muscle contraction being represented by a vertical line reaching from “O” to “1” on the y-axis.

[1096] At 1102, around the 10-minute mark, ingestible device 100 first enters the duodenum (e.g., as determined by ingestible device 100 performing process 600 (FIG. 6)). Shortly thereafter, at 1108, ingestible device 100 begins to detect several muscle contractions 1106 in quick succession, which may be indicative of the strong peristaltic waves that form in the jejunum (e.g., jejunum 314 (FIG. 3)). Later, around 1110, ingestible device 100 continues to detect intermittent muscle contractions, which may be consistent with an ingestible device 100 within the ileum. Finally at 1104, ingestible device 100 transitions out of the small intestine, and into the cecum. Notably, ingestible device 100 detects more frequent muscle contractions in the jejunum portion of the small intestine as compared to the ileum portion of the small intestine, and ingestible device 100 does not measure any muscle contractions after having exited the small intestine. In some embodiments, ingestible device 100 may incorporate this information into a localization process. For example, ingestible device 100 may be configured to detect a transition from a jejunum to an ileum in response to determining that a frequency of detected muscle contractions (e.g., the number of muscle contractions measured in a given 10-minute window) has fallen below a threshold number. As another example, ingestible device 100 may be configured to detect a transition from an ileum to a cecum in response to determining that no muscle contractions have been detected for a threshold period of time. It is understood that these examples are intended to be illustrative, and not limiting, and that measurements of muscle contractions may be combined with any of the other processes, systems, or methods discussed in this disclosure.

[1097] FIG. 12 is a flowchart 1200 for certain embodiments for determining a transition of the device from the jejunum to the ileum. It is to be noted that, in general, the jejunum is redder and more vascular than the ileum. Moreover, generally, in comparison to the ileum, the jejunum has a thicker intestine wall with more messentary fat. These differences between the jejunum and the ileum are expected to result in differences in optical responses in the jejunum relative to the ileum. Optionally, one or more optical signals may be used to investigate the differences in optical responses. For example, the process can include monitoring a change in optical response in reflected red light, blue light, green light, ratio of red light to green light, ratio of red light to blue light, and/or ratio of green light to blue light. In some embodiments, reflected red light is detected in the process.

[1098] Flowchart 1200 represents a single sliding window process. In step 1210, the jejunum reference signal is determined based on optical reflection. Typically, this signal is as the average signal (e.g., reflected red light) over a period of time since the device was determined to enter the jejunum. The period of time can be, for example, from five minutes to 40 minutes (e.g., from 10 minutes to 30 minutes, from 15 minutes to 25 minutes). In step 1220, the detected signal (e.g., reflected red light) just after the period of time used in step 1210 is normalized to the reference signal determined in step 1210. In step 1230, the signal (e.g., reflected red light) is detected. In step 1240, the mean signal detected based on the single sliding window is compared to a signal threshold. The signal threshold in step 1240 is generally a fraction of the reference signal of the jejunum reference signal determined in step 1210. For example, the signal threshold can be from 60% to 90% (e.g., from 70% to 80%) of the jejunum reference signal. If the mean signal exceeds the signal threshold, then the process determines that the device has entered the ileum at step 1250. If the mean signal does not exceed the signal threshold, then the process returns to step 1230.

[1099] FIG. 13 is a flowchart 1200 for certain embodiments for determining a transition of the device from the jejunum to the ileum using a two sliding window process. In step 1310, the jejunum reference signal is determined based on optical reflection. Typically, this signal is as the average signal (e.g., reflected red light) over a period of time since the device was determined to enter the jejunum. The period of time can be, for example, from five minutes to 40 minutes (e.g., from 10 minutes to 30 minutes, from 15 minutes to 25 minutes). In step 1320, the detected signal (e.g., reflected red light) just after the period of time used in step 1310 is normalized to the reference signal determined in step 1310. In step 1330, the signal (e.g., reflected red light) is detected. In step 1340, the mean difference in the signal detected based on the two sliding windows is compared to a signal threshold. The signal threshold in step 1340 is based on whether the mean difference in the detected signal exceeds a multiple (e.g., from 1.5 times to five times, from two times to four times) of the detected signal of the first window. If signal threshold is exceeded, then the process determines that the device has entered the ileum at step 1350. If the signal threshold is not exceeded, then the process returns to step 1330.

[1100] FIG. 14 is a flowchart 1400 for a process for certain embodiments for determining a transition of the device from the ileum to the cecum. In general, the process involves detecting changes in the reflected optical signal (e.g., red light, blue light, green light, ratio of red light to green light, ratio of red light to blue light, and/or ratio of green light to blue light). In some embodiments, the process includes detecting changes in the ratio of reflected red light to reflected green light, and also detecting changes in the ratio of reflected green light to reflected blue light. Generally, in the process 1400, the sliding window analysis (first and second windows) discussed with respect to process 600 is continued.

[1101] Step 1410 includes setting a first threshold in a detected signal, e.g., ratio of detected red light to detected green light, and setting a second threshold for the coefficient of variation for a detected signal, e.g., the coefficient of variation for the ratio of detected green light to detected blue light. The first threshold can beset to a fraction (e.g., from 0.5 to 0.9, from 0.6 to 0.8) of the average signal (e.g., ratio of detected red light to detected green light) in the first window, or a fraction (e.g., from 0.4 to 0.8, from 0.5 to 0.7) of the mean difference between the detected signal (e.g., ratio of detected red light to detected green light) in the two windows. The second threshold can be set to 0.1 (e.g., 0.05, 0.02).

[1102] Step 1420 includes detecting the signals in the first and second windows that are to be used for comparing to the first and second thresholds.

[1103] Step 1430 includes comparing the detected signals to the first and second thresholds. If the corresponding value is not below the first threshold or the corresponding value is not below the second threshold, then it is determined that the device has not left the ileum and entered the cecum, and the process returns to step 1420. If the corresponding value is below the first threshold and the corresponding value is below the second threshold, then it is determined that the device has left the ileum and entered the cecum, and the proceeds to step 1440.

[1104] Step 1450 includes determining whether it is the first time that that the device was determined to leave the ileum and enter the cecum. If it is the first time that the device was determined to leave the ileum and enter the cecum, then the process proceeds to step 1460. If it is not the first time that the device has left the ileum and entered the cecum, then the process proceeds to step 1470.

[1105] Step 1460 includes setting a reference signal. In this step the optical signal (e.g., ratio of detected red light to detected green light) as a reference signal.

[1106] Step 1470 includes determining whether the device may have left the cecum and returned to the ileum. The device is determined to have left the cecum and returned to the ileum if the corresponding detected signal (e.g., ratio of detected red light to detected green light) is statistically comparable to the reference signal (determined in step 1460) and the coefficient of variation for the corresponding detected signal (e.g., ratio of detected green light to detected blue light) exceeds the second threshold. If it is determined that the device may have left the cecum and returned to the ileum, the process proceeds to step 1480.

[1107] Step 1480 includes continuing to detect the relevant optical signals for a period of time (e.g., at least one minute, from five minutes to 15 minutes).

[1108] Step 1490 includes determining whether the signals determined in step 1480 indicate (using the methodology discussed in step 1470) that the device re-entered the ileum. If the signals indicate that the device re-entered the ileum, the process proceeds to step 1420. If the signals indicate that the device is in the cecum, the process proceeds to step 1492.

[1109] Step 1492 includes continuing to monitor the relevant optical signals for a period of time (e.g., at least 30 minutes, at least one hour, at least two hours).

[1110] Step 1494 includes determining whether the signals determined in step 1492 indicate (using the methodology discussed in step 1470) that the device re-entered the ileum. If the signals indicate that the device re-entered the ileum, the process proceeds to step 1420. If the signals indicate that the device is in the cecum, the process proceeds to step 1496.

[1111] At step 1496, the process determines that the device is in the cecum.

[1112] FIG. 15 is a flowchart 1500 for a process for certain embodiments for determining a transition of the device from the cecum to the colon. In general, the process involves detecting changes in the reflected optical signal (e.g., red light, blue light, green light, ratio of red light to green light, ratio of red light to blue light, and/or ratio of green light to blue light). In some embodiments, the process includes detecting changes in the ratio of reflected red light to reflected green light, and also detecting changes in the ratio of reflected blue light. Generally, in the process 1500, the sliding window analysis (first and second windows) discussed with respect to process 1400 is continued.

[1113] In step 1510, optical signals (e.g., the ratio of reflected red signal to reflected green signal, and reflected blue signal) are collected for a period of time (e.g., at least one minute, at least five minutes, at least 10 minutes) while the device is in the cecum (e.g., during step 1480). The average values for the recorded optical signals (e.g., the ratio of reflected red signal to reflected green signal, and reflected blue signal) establish the cecum reference signals.

[1114] In step 1520, the optical signals are detected after it has been determined that the device entered the cecum (e.g., at step 1440). The optical signals are normalized to the cecum reference signals.

[1115] Step 1530 involves determining whether the device has entered the colon. This includes determining whether any of three different criteria are satisfied. The first criterion is satisfied if the mean difference in the ratio of a detected optical signal (e.g., ratio of detected red signal to the detected green) is a multiple greater than one (e.g., 2X, 3X, 4X) the standard deviation of the corresponding signal (e.g., ratio of detected red signal to the detected green) in the second window. The second criterion is satisfied if the mean of a detected optical signal (e.g., a ratio of detected red light to detected green light) exceeds a given value (e.g., exceeds one). The third criterion is satisfied if the coefficient of variation of an optical signal (e.g., detected blue light) in the first window exceeds a given value (e.g., exceeds 0.2). If any of the three criteria are satisfied, then the process proceeds to step 1540. Otherwise, none of the three criteria are satisfied, the process returns to step 1520.

[1116] For illustrative purposes the disclosure focuses primarily on a number of different example embodiments of an ingestible device, and example embodiments of methods for determining a location of an ingestible device within a GI tract. However, the possible ingestible devices that may be constructed are not limited to these embodiments, and variations in the shape and design may be made without significantly changing the functions and operations of the device. Similarly, the possible procedures for determining a location of the ingestible device within the GI tract are not limited to the specific procedures and embodiments discussed (e.g., process 500 (FIG. 5), process 600 (FIG. 6), process 900 (FIG. 9), process 1200 (FIG. 12), process 1300 (FIG. 13), process 1400 (FIG. 14) and process 1500 (FIG. 15)). Also, the applications of the ingestible devices described herein are not limited merely to gathering data, sampling and testing portions of the gastrointestinal tract, or delivering medicament. For example, in some embodiments the ingestible device may be adapted to include a number of chemical, electrical, or optical diagnostics for diagnosing a number of diseases. Similarly, a number of different sensors for measuring bodily phenomenon or other physiological qualities may be included on the ingestible device. For example, the ingestible device may be adapted to measure elevated levels of certain chemical compounds or impurities in the gastrointestinal tract, or the combination of localization, sampling, and appropriate diagnostic and assay techniques incorporated into a sampling chamber may be particularly well suited to determine the presence of small intestinal bacterial overgrowth (SIBO).

[1117] At least some of the elements of the various embodiments of the ingestible device described herein that are implemented via software (e.g., software executed by control circuitry within PCB 120 (FIG. 2)) may be written in a high-level procedural language such as object oriented programming, a scripting language or both. Accordingly, the program code may be written in C, C* or any other suitable programming language and may comprise modules or classes, as is known to those skilled in object oriented programming. Alternatively, or in addition, at least some of the elements of the embodiments of the ingestible device described herein that are implemented via software may be written in assembly language, machine language or firmware as needed. In either case, the language may be a compiled or an interpreted language.

[1118] At least some of the program code used to implement the ingestible device can be stored on a storage media or on a computer readable medium that is readable by a general or special purpose programmable computing device having a processor, an operating system and the associated hardware and software that is necessary to implement the functionality of at least one of the embodiments described herein. The program code, when read by the computing device, configures the computing device to operate in a new, specific and predefined manner in order to perform at least one of the methods described herein.

[1119] Furthermore, at least some of the programs associated with the systems, devices, and methods of the example embodiments described herein are capable of being distributed in a computer program product comprising a computer readable medium that bears computer usable instructions for one or more processors. The medium may be provided in various forms, including non-transitory forms such as, but not limited to, one or more diskettes, compact disks, tapes, chips, and magnetic and electronic storage. In some embodiments, the medium may be transitory in nature such as, but not limited to, wire-line transmissions, satellite transmissions, internet transmissions (e.g. downloads), media, digital and analog signals, and the like. The computer useable instructions may also be in various formats, including compiled and non-compiled code.

[1120] The techniques described above can be implemented using software for execution on a computer. For instance, the software forms procedures in one or more computer programs that execute on one or more programmed or programmable computer systems (which may be of various architectures such as distributed, client/server, or grid) each including at least one processor, at least one data storage system (including volatile and non-volatile memory and/or storage elements), at least one input device or port, and at least one output device or port.

[1121] The software may be provided on a storage medium, such as a CD-ROM, readable by a general or special purpose programmable computer or delivered (encoded in a propagated signal) over a communication medium of a network to the computer where it is executed. All of the functions may be performed on a special purpose computer, or using special-purpose hardware, such as coprocessors. The software may be implemented in a distributed manner in which different parts of the computation specified by the software are performed by different computers. Each such computer program is preferably stored on or downloaded to a storage media or device (e.g., solid state memory or media, or magnetic or optical media) readable by a general or special purpose programmable computer, for configuring and operating the computer when the storage media or device is read by the computer system to perform the procedures described herein. The inventive system may also be considered to be implemented as a computer-readable storage medium, configured with a computer program, where the storage medium so configured causes a computer system to operate in a specific and predefined manner to perform the functions described herein.

### Methods and Mechanisms of Delivery

[1122] FIG. 16 provides an example mock-up diagram illustrating aspects of a structure of an ingestible device 1600 for delivering a dispensable substance, such as a formulation of a therapeutic agent described herein, according to some embodiments described herein. In some embodiments, the ingestible device 1600 may generally be in the shape of a capsule, a pill or any swallowable form that may be orally consumed by an individual. In this way, the ingestible device 1600 may be ingested by a patient and may be prescribed by healthcare practitioners and patients.

[1123] FIG. 16 provides an example mock-up diagram illustrating aspects of a structure of an ingestible device 1600 for delivering a dispensable substance, according to some embodiments described herein. In some embodiments, the ingestible device 1600 may generally be in the shape of a capsule, a pill or any swallowable form that may be orally consumed by an individual. In this way, the ingestible device 1600 may be ingested by a patient and may be prescribed by healthcare practitioners and patients.

[1124] The ingestible device 1600 includes a housing 1601 that may take a shape similar to a capsule, a pill, and/or the like, which may include two ends 1602a-b. The housing 1601 may be designed to withstand the chemical and mechanical environment of the GI tract (e.g., effects of muscle contractile forces and concentrated hydrochloric acid in the stomach). A broad range of materials that may be used for the housing 1601. Examples of these materials include, but are not limited to, thermoplastics, fluoropolymers, elastomers, stainless steel and glass complying with ISO 10993 and USP Class VI specifications for biocompatibility; and any other suitable materials and combinations thereof.

[1125] In some embodiment, the wall of the housing 1601 may have a thickness of 0.5 mm-1 mm, which is sufficient to sustain an internal explosion (e.g., caused by hydrogen ignition or over pressure inside the housing).

[1126] The housing 1601 may or may not have a pH-sensitive enteric coating to detect or otherwise be sensitive to a pH level of the environment external to the ingestible device. As discussed elsewhere in the application in more detail, the ingestible device 1600 may additionally or alternatively include one more sensors, e.g., temperature sensor, optical sense.

[1127] The housing 1601 may be formed by coupling two enclosure portions together. The ingestible device 1600 may include an electronic component within the housing 1600. The electronic component may be placed proximally to an end 1602b of the housing, and includes a printed circuit board (PCB), a battery, an optical sensing unit, and/or the like.

[1128] The ingestible device 1600 further includes a gas generating cell 1603 that is configured to generate gas and thus cause an internal pressure within the housing 1601. In some embodiments, the gas generating cell may include or be connected to a separate channel or valve of the ingestible device such that gas may be release through the channel or valve to create a motion to alter the position of the ingestible device within the GI tract. Such gas release can also be used to position the ingestible device relative to the intestinal lining. In another embodiment, gas may be released through the separate channel or valve to alter the surface orientation of the intestinal tissue prior to delivery of the dispensable substance.

[1129] A traveling plunger 1604 may be placed on top of the gas generating cell 1603 within the housing 1601. The traveling plunger 1604 is a membrane that separates the gas generating cell 1603 and a storage reservoir that stores the dispensable substance 1605. In some embodiments, the traveling plunger 1604 may be a movable piston. In some embodiments, the traveling plunger 1604 may instead be a flexible membrane such as but not limited to a diaphragm. In some embodiments, the traveling plunger 1604, which may have the form of a flexible diaphragm, may be placed along an axial direction of the housing 1601, instead of being placed on top of the gas generating cell 1603. The traveling plunger or the membrane 1604 may move (when the membrane 1604 is a piston) or deform (when the membrane 1604 is a diaphragm) towards a direction of the end 1602a of the housing, when the gas generating cell 1603 generates gas to create an internal pressure that pushes the membrane 1604. In this way, the membrane or traveling plunger 1604 may push the dispensable substance 1605 out of the housing via a dispensing outlet 1607.

[1130] The housing 1601 may include a storage reservoir storing one or more dispensable substances 1605 adjacent to the traveling plunger 1604. The dispensable substance 1605 may be a therapeutic or medical agent that may take a form of a powder, a compressed powder, a fluid, a semi-liquid gel, or any other dispensable or deliverable form. The delivery of the dispensable substance 1605 may take a form such as but not limited to bolus, semi-bolus, continuous, burst drug delivery, and/or the like. In some embodiments, a single bolus is delivered proximate to the disease location. In some embodiments, more than one bolus is released at one location or more than one location. In some embodiments the release of more than one bolus is triggered according to a pre-programmed algorithm. In some embodiments the release profile is continuous. In some embodiments the release profile is time-based. In some embodiments the release profile is location-based. In some embodiments, the amount delivered is based on the severity and/or extent of the disease in the following manner. In some embodiments, the bolus is delivered in one or more of the following locations: stomach; duodenum; proximal jejunum; ileum; cecum; ascending colon; transverse colon; descending colon.

[1131] In some embodiments the dispensable substance is a small molecule therapeutic that is released in the cecum and/or other parts of the large intestine. Small molecules that are administered by typical oral routes are primarily absorbed in the small intestine, with much lower absorption taking place in the large intestine (outside of the rectum). Accordingly, an ingestible device that is capable of releasing a small molecule selectively in the large intestine (e.g., the cecum) with resulting low systemic levels (even when high doses are used) is attractive for subjects with inflammatory bowel disease in the large intestine.

[1132] In some embodiments, the storage reservoir may include multiple chambers, and each chamber stores a different dispensable substance. For example, the different dispensable substances can be released at the same time via the dispensing outlet 1607. Alternatively, the multiple chambers may take a form of different layers within the storage reservoir such that the different dispensable substance from each chamber is delivered sequentially in an order. In one example, each of the multiple chambers is controlled by a separate traveling plunger, which may be propelled by gas generation. The electronic component may control the gas generating cell 1603 to generate gas to propel a specific traveling plunger, e.g., via a separate gas generation chamber, etc., to delivery the respective substance. In some embodiments, the content of the multiple chambers may be mixed or combined prior to release, for example, to activate the drug.

[1133] The ingestible device 1600 may include a dispensing outlet 1607 at one end 1602a of the housing 1601 to direct the dispensable substance 105 out of the housing. The dispensing outlet 1607 may include an exit valve, a slit or a hole, a jet injection nozzle with a syringe, and/or the like. When the traveling plunger 1604 moves towards the end 1602a of the housing 1601, an internal pressure within the storage reservoir may increase and push the dispensing outlet to be open to let the dispensable substance 1605 be released out of the housing 1601.

[1134] In an embodiment, a pressure relief device 1606 may be placed within the housing 1601, e.g., at the end 1602a of the housing 1601.

[1135] In some embodiments, the housing 1601 may include small holes (e.g., with a diameter smaller than 2 mm), e.g., on the side of the housing 1601, or at the end 1602a to facilitate loading the dispensable substance into the storage reservoir.

[1136] In some embodiments, a feedback control circuit (e.g., a feedback resistor, etc.) may be added to send feedback from the gas generating cell 1603 to the electronic component such that when the internal pressure reaches a threshold level, the electronic component may control the gas generating cell 1603 to turn off gas generation, or to activate other safety mechanism (e.g., feedback-controlled release valve, etc.). For example, an internal pressure sensor may be used to measure the internal pressure within the ingestible device and generate feedback to the feedback control circuit.

[1137] FIG. 17 provides an example diagram illustrating aspects of a mechanism for a gas generating cell 1603 configured to generate a gas to dispense a substance, according to some embodiments described herein. As shown in FIG. 17, the gas generating cell 1603 generates a gas 1611 which can propel the dispensable substance 1605 out of the dispensing outlet 1607. A variable resistor 1608 may be connected to a circuit with the gas generating cell 1603 such that the variable resistor 1608 may be used to control an intensity and/or an amount of gas 1611 (e.g., hydrogen) generated by the cell 1603. Specifically, the gas generating cell 1603 may be a battery form factor cell that is capable of generating hydrogen when a resistor is applied. In this way, as the gas generating cell 1603 only needs the use of a resistor only without any active power requirements, the gas generating cell 1603 may be integrated into an ingestible device such as a capsule with limited energy/power available. For example, the gas generating cell 1603 may be compatible with a capsule at a size of 26 mm×13 mm or smaller.

[1138] In some embodiments, based on the elution rate of gas from the cell, and an internal volume of the ingestible device, it may take time to generate sufficient gas 1611 to deliver the substance 1605, and the time required may be 30 seconds or longer. For example, the time to generate a volume of hydrogen equivalent to 500 μL of fluid would be approximately 5 minutes. A longer period of time may be needed based upon non-ideal conditions within the ingestible device, such as friction, etc. Thus, given that the production of gas (e.g., hydrogen) may take time, gas generation may need to start prior to the ingestible device arriving at the site of delivery to build pressure up within the device. The ingestible device may then need to know when it is approaching the site of delivery. For example, the device may start producing gas on an “entry transition,” which is determined by temperature, so as to produce enough gas to be close to the pressure high enough to deliver the dispensable substance. The ingestible device may then only start producing gas again when it arrives at the site of delivery, which will cause the internal pressure within the ingestible device to reach a level required by the dispensing outlet to release the dispensable substance. Also, for regio-specific delivery, the ingestible device may estimate the time it takes to build up enough pressure to deliver the dispensable substance before the ingestible device arrives at a specific location, to activate gas generation.

[1139] For example, for systemic delivery, when an internal volume of the ingestible device is around 500 μL, a gas generation time of 2 hours, an initial pressure of approximately 300 pound per square inch absolute (psia) may be generated, with higher and lower pressures possible. The generated pressure may drop when air enters the storage reservoir which was previously occupied by the dispensable substance during the dispensing process. For systemic drug delivery, a force with a generated pressure of approximately 100 to 360 pound per square inch (psi) may be required for dermal penetration, e.g., to penetrate the mucosa or epithelial layer. The pressure may also vary depending on the nozzle design at the dispensing outlet, fluid viscosity, and surrounding tissue proximity and properties.

[1140] The gas 1611 that may be generated for a continuous delivery of drug (e.g., 1 cc H₂ in 4 hours, 16 breaths per minute at 0.5L tidal volume) may equate to 1 cc hydrogen in approximately 2000L of exhaled air, or approximately 0.5 ppm H2, which is below physiologic values of exhaled hydrogen. Reducing this time to 10 minutes equates to approximately 13 ppm hydrogen. Thus, due to the length of intestine that may be covered during this time period, the ingestible device may possess a higher localized value than physiologic.

[1141] FIGS. 18 and 19, disclosed in U.S. Provisional Application No. 62/385,553, incorporated by reference herein in its entirety, illustrates an example of an ingestible device for localized delivery of pharmaceutical compositions disclosed herein, in accordance with particular implementations. The ingestible device 1600 includes a piston or drive element 1634 to push for drug delivery, in accordance with particular implementations described herein. The ingestible device 1600 may have one or more batteries 1631 placed at one end 1602a of a housing 1601 to provide power for the ingestible device 1600. A printed circuit board (PCB) 1632 may be placed adjacent to a battery or other power source 1631, and a gas generating cell 1603 may be mounted on or above the PCB 1632. The gas generating cell 1603 may be sealed from the bottom chamber (e.g., space including 1631 and 1632) of the ingestible device 1600. A movable piston 1634 may be placed adjacent to the gas generating cell 1603. In this way, gas generation from the gas generating cell 1603 may propel a piston 1634 to move towards another end 1602b of the housing 1601 such that the dispensable substance in a reservoir compartment 1635 can be pushed out of the housing through a dispensing outlet 1607, e.g., the movement is shown at 1636, with the piston 1634 at a position after dispensing the substance. The dispensing outlet 1607 may comprise a plug. The reservoir compartment 1635 can store the dispensable substance (e.g., drug substance), or alternatively the reservoir compartment can house a storage reservoir 1661 which comprises the dispensable substance. The reservoir compartment 1635 or storage reservoir 1661 may have a volume of approximately 600 μL or even more dispensable substance, which may be dispensed in a single bolus, or gradually over a period of time.

[1142] The battery cells 1631 may have a height of 1.65 mm each, and one to three batteries may be used. The height of the piston may be reduced with custom molded part for around 1.5 mm to save space. If the gas generating cell 1603 is integrated with the piston 1634, the overall height of the PCB, batteries and gas generating cell in total can be reduced to around 5 mm, thus providing more space for drug storage. For example, for an ingestible device of 7.8 mm in length (e.g., from end 1602a to the other end 1602b), a reservoir compartment 1635 or a storage reservoir 1661 of approximately 600 μL may be used for drug delivery. For another example, for an ingestible device of 17.5 mm in length, a reservoir compartment 1635 or a storage reservoir 1661 of approximately 1300 μL may be used for drug release.

[1143] In some implementations, at the reservoir 1635 or 1661 for storing a therapeutically effective amount of any of the agents described herein at least a portion of the device housing 1601. The therapeutically effective amount of the any of the agents described herein can be stored in the reservoir 1635 or 1661 at a particular pressure, for example, determined to be higher than a pressure inside the GI tract so that once the reservoir 1635 or 1661 is in fluid communication with the GI tract, the =agent is automatically released. In certain implementations, the reservoir compartment 1635 includes a plurality of chambers, and each of the plurality of the chambers stores a different dispensable substance or a different storage reservoir 1661.

[1144] In certain embodiments, the storage reservoir 1661 is a compressible component or has compressible side walls. In particular embodiments, the compressible component can be composed, at least in part, or coated (e.g., internally) with polyvinyl chloride (PVC), silicone, DEHP (di-2-ethylhexyl phthalate), Tyvek, polyester film, polyolefin, polyethylene, polyurethane, or other materials that inhibit the immune modulator (e.g., any of the immune modulators described herein) from sticking to the reservoir and provide a sterile reservoir environment for the immune modulator. The storage reservoir 1661 can be hermetically sealed. The reservoir compartment 1635 or storage reservoir 1661 can be configured to store the immune modulator (e.g., any of the immune modulators described herein) in quantities in the range of 0.01 mL-2 mL, such as 0.05 mL-2 mL, such as 0.05 mL-2 mL, such as 0.6 mL-2 mL. In some embodiments, the storage reservoir 1661 is attachable to the device housing 1601, for example, in the reservoir compartment. Accordingly, the storage reservoir 1635 can be loaded with the immune modulator (e.g., any of the immune modulators described herein) prior to being positioned in and/or coupled to the ingestible device housing 1601. The ingestible device housing 1601 includes one or more openings configured as a loading port to load the dispensable substance into the reservoir compartment. In another embodiment, the ingestible device housing 1601 includes one or more openings configured as a vent.

[1145] In certain embodiments, the ingestible device housing 1601 includes one or more actuation systems (e.g., gas generating cell 1603) for pumping the immune modulator (e.g., any of the immune modulators described herein) from the reservoir 1635. In some embodiments, the actuation system can include a mechanical, electrical, electromechanical, hydraulic, and/or fluid actuation system. For example, a chemical actuation means may use chemical reaction of mixing one or more reagents to generate a sufficient volume of gas to propel the piston or drive element 1634 for drug release. The actuation system can be integrated into the reservoir compartment 1635 or can be an auxiliary system acting on or outside of the reservoir compartment 1635. For example, the actuation system can include pumping system for pushing/pulling the immune modulator (e.g., any of the immune modulators described herein) out of the reservoir compartment 1635 or the actuation system can be configured to cause the reservoir compartment 1635 to change structurally so that the volume inside of the reservoir compartment 1635 changes, thereby dispensing the immune modulator from the reservoir compartment 1635. The actuation system can include an energy storage component such as a battery or a capacitor for powering the actuation system. The actuation system can be actuated via gas pressure or a system storing potential energy, such as energy from an elastic reservoir component being expanded during loading of the reservoir and after being positioned in the ingestible device housing 1601 being subsequently released from the expanded state when the ingestible device housing is at the location for release within the GI tract. In certain embodiments, the reservoir compartment 1635 can include a membrane portion, whereby the immune modulator (e.g., any of the immune modulators described herein) is dispensed from the reservoir compartment 1635 or storage reservoir 1661 via osmotic pressure.

[1146] In particular embodiments the storage reservoir 1661 is in a form of a bellow that is configured to be compressed via a pressure from the gas generating cell. The immune modulator may be loaded into the bellow, which may be compressed by gas generation from the gas generating cell or other actuation means to dispense the dispensable substance through the dispensing outlet 1607 and out of the housing 1601. In some embodiments, the ingestible device includes a capillary plate placed between the gas generating cell and the first end of the housing, and a wax seal between the gas generating cell and the reservoir, wherein the wax seal is configured to melt and the dispensable substance is pushed through the capillary plate by a pressure from the gas generating cell. The shape of the bellow may aid in controlled delivery. The reservoir compartment 1635 includes a dispensing outlet, such as a valve or dome slit 1662 extending out of an end of the housing 1601, in accordance with particular implementations. Thus when the bellow is being compressed, the dispensable substance may be propelled out of the bellow through the valve or the dome slit.

[1147] In certain embodiments, the reservoir compartment 1635 includes one or more valves (e.g. a valve in the dispensing outlet 1607) that are configured to move or open to fluidly couple the reservoir compartment 1635 to the GI tract. In certain embodiments, a housing wall of the housing 1601 can form a portion of the reservoir compartment 1635. In certain embodiments, the housing walls of the reservoir serve as a gasket. One or more of the one or more valves are positioned in the housing wall of the device housing 1601, in accordance with particular implementations. One or more conduits may extend from the reservoir 1635 to the one or more valves, in certain implementations.

[1148] In certain embodiments, a housing wall of the housing 1601 can be formed of a material that is configured to dissolve, for example, in response to contact at the disease site. In certain embodiments, a housing wall of the housing 1601 can be configured to dissolve in response to a chemical reaction or an electrical signal. The one or more valves and/or the signals for causing the housing wall of the housing 1601 to dissolve or dissipate can be controlled by one or more processors or controllers positioned on PCB 1632 in the device housing 1601. The controller is communicably coupled to one or more sensors or detectors configured to determine when the device housing 1601 is proximate to a disease site. The sensors or detectors comprise a plurality of electrodes comprising a coating, in certain implementations. Releasing of the immune modulator (e.g., any of the immune modulators described herein) from the reservoir compartment 1635 is triggered by an electric signal from the electrodes resulting from the interaction of the coating with the one or more sites of disease site. The one or more sensors can include a chemical sensor, an electrical sensor, an optical sensor, an electromagnetic sensor, a light sensor, a gas sensor, and/or a radiofrequency sensor. Methods for detecting volatile organic compounds (VOCs) and other gases from a biological sample include resistive metal oxide gas sensors/mixed metal oxide gas sensors, electrochemical gas sensors, optical/IR gas sensors, conducting polymer/composite polymer resistive/capacitive gas sensors, quartz crystal microbalance gas sensors, carbon nanotubes, and pellister/calorimetric gas sensors. Examples of ingestible gas sensors are described in US Patent Publication No. US20130289368, which published on Oct. 31, 2013, US Patent Publication No. US20170284956, which published on Oct. 5, 2017, and PCT Patent Publication No. WO2016197181, which published on Dec. 15, 2016. Examples of gases that can be detected in the gastrointestinal tract using a sensor include, but are not limited to, oxygen, hydrogen, and carbon dioxide.

[1149] In particular embodiments, the device housing 1601 can include one or more pumps configured to pump the therapeutically effective amount of the immune modulator from the reservoir compartment 1635. The pump is communicably coupled to the one or more controllers. The controller is configured to activate the pump in response to detection by the one or more detectors of the disease site and activation of the valves to allow the reservoir 1635 to be in fluid communication with the GI tract. The pump can include a fluid actuated pump, an electrical pump, or a mechanical pump.

[1150] In certain embodiments, the device housing 1601 comprises one or more anchor systems for anchoring the device housing 1601 or a portion thereof at a particular location in the GI tract adjacent the disease site. In some embodiments, a storage reservoir comprises an anchor system, and the storage reservoir comprising a releasable substance is anchored to the GI tract. The anchor system can be activated by the controller in response to detection by the one or more detectors of the intended site of release. In certain implementations, the anchor system includes legs or spikes configured to extend from the housing wall(s) of the device housing 1601. The spikes can be configured to retract and/or can be configured to dissolve over time. An example of an attachable device that becomes fixed to the interior surface of the GI tract is described in PCT Patent Application PCT/US2015/012209, “Gastrointestinal Sensor Implantation System”, filed Jan. 21, 2015, which is hereby incorporated by reference herein in its entirety.

[1151] FIG. 20 provides an example structural diagram having a flexible diaphragm 1665 that may deform towards the dispensing outlet 1607 when the gas generating cell 1603 generates gas. The dispensable substance may then be propelled by the deformed diaphragm out of the housing through the dispensing outlet 1607. The dispensing outlet 1607 shown at FIG. 20 is in the form of a ring valve, however, any outlet design can be applied.

[1152] In some embodiments, an ingestible device can have an umbrella-shaped exit valve structure as a dispensing outlet of the ingestible device. Optionally, an ingestible device can have a flexible diaphragm to deform for drug delivery, and/or an integrated piston and gas generating cell such that the gas generating cell is movable with the piston to push for drug delivery.

[1153] In certain embodiments, an ingestible device can be anchored within the intestine by extending hooks from the ingestible device after it has entered the region of interest. For example, when the ingestible device determines it has arrived at a location within the GI tract, the hooks can be actuated to extend outside of the ingestible device to catch in the intestinal wall and hold the ingestible device in the respective location. In some embodiments, the hook can pierce into the intestinal wall to hold the ingestible device 100 in place. The hooks can be hollow. A hollow hook can be used to anchor the ingestible device and/or to dispense a substance from the dispensable substance, e.g., into the intestinal wall.

[1154] In some embodiments an ingestible device includes an intestinal gripper to grip a portion of the intestinal wall for delivering the dispensable substance. Such a gripper can include two or more arms configured to out of the device and close to grip a portion of the intestinal wall.

[1155] An injecting needle can be used with the anchoring arms to inject dispensable substance into the intestinal wall after a portion of the intestinal wall is gripped.

[1156] In some embodiments, when the gas generating cell generates gas to propel the piston to move towards the nozzle such that the dispensable substance can be pushed under the pressure to break a burst disc to be injected via the nozzle.

[1157] In some embodiments, an ingestible device has a jet delivery mechanism with enhanced usable volume of dispensable substance. For example, the nozzle may be placed at the center of the ingestible device, and gas channels may be placed longitudinally along the wall of the ingestible device to transport gas from the gas generating cell to propel the piston, which is placed at an end of the ingestible device.

[1158] In some embodiments, the ingestible device can use osmotic pressure to adhere a suction device of the ingestible device to the intestinal wall. For example, the ingestible device may have an osmotic mechanism that has a chamber storing salt crystals. The chamber can include a mesh placed in proximate to a burst valve at one end of the chamber, and a reverse osmosis (RO) membrane placed in proximate to a valve on the other end of the chamber. A suction device, e.g., two or more suction fingers, is placed outside of the chamber with an open outlet exposed to luminal fluid in the GI tract. When the osmotic mechanism is inactivated, e.g., the valve is closed so that no luminal fluid is drawn into the osmotic chamber. When the osmotic mechanism is activated by opening the valve, luminal fluid enters the ingestible device through an outlet of the suction device and enters the osmotic chamber through the valve. The salt in the chamber is then dissolved into the fluid. The RO membrane prevents any fluid to flow in the reverse direction, e.g., from inside the chamber to the valve. The fluid continues to flow until all the salt contained in the chamber is dissolved or until intestinal tissue is drawn into the suction device. As luminal fluid keeps flowing into the chamber, the solution of the luminal fluid with dissolved salt in the chamber may reduce osmotic pressure such that the suction force at may also be reduced. In this way, suction of the intestinal tissue may stall before the tissue is in contact with the valve to avoid damage to the intestinal tissue.

[1159] An ingestible device employing an osmotic mechanism can also include a suction device as illustrated. The suction device can be two or more suction fingers 347a-b disposed proximate to the outlet. The outlet can be connected to a storage reservoir storing the dispensable substance (e.g., therapeutic agent). The storage reservoir can contact a piston (similar to 104 in FIG. 16), which can be propelled by pressure generated from the osmotic pump to move towards the outlet. The osmotic pump can be similar to the osmotic mechanism described in the preceding paragraph. A breakaway section can be placed in proximate to the other end (opposite to the end where the outlet 107 is disposed) of the ingestible device.

[1160] In some embodiments, tumbling suction by an ingestible device is used. Such an ingestible device does not require any electronics or other actuation elements. Such an ingestible device may constantly, intermittently, or periodically tumble when travelling through the intestine. When the ingestible device tumbles to a position that the outlet is in direct contact with the intestinal wall, a suction process similar to that described in the preceding paragraph may occur. Additional structural elements such as fins, flutes or the like may be added to the outer wall of the ingestible device 100 to promote the tumbling motion.

[1161] In certain embodiments, the reservoir is an anchorable reservoir, which is a reservoir comprising one or more anchor systems for anchoring the reservoir at a particular location in the GI tract adjacent to the intended site of delivery of the immune modulator. In certain embodiments, the anchor system includes legs or spikes or other securing means such as a piercing element, a gripping element, a magnetic-flux-guiding element, or an adhesive material, configured to extend from the anchorable reservoir of the device housing. The spikes can be configured to retract and/or can be configured to dissolve over time. In some embodiments, the anchorable reservoir is suitable for localizing, positioning and/or anchoring. In some embodiments, the anchorable reservoir is suitable for localizing, and positioning and/or anchoring by an endoscope. In some embodiments, the anchorable reservoir is connected to the endoscope. In some embodiments, the anchorable reservoir is connected to the endoscope in a manner suitable for oral administration. In some embodiments, the anchorable reservoir is connected to the endoscope in a manner suitable for rectal administration. Accordingly, provided herein in some embodiments is an anchorable reservoir is connected to an endoscope wherein the anchorable reservoir comprises a therapeutically effective amount of any of the agents described herein. In some embodiments the endoscope is fitted with a spray catheter.

[1162] Exemplary embodiments of anchorable reservoirs are as follows. In more particular examples of the following exemplary embodiments the reservoir is connected to an endoscope.

[1163] In one embodiment, the anchorable reservoir comprises an implant capsule for insertion into a body canal to apply radiation treatment to a selected portion of the body canal. The reservoir includes a body member defining at least one therapeutic treatment material receiving chamber and at least one resilient arm member associated with the body member for removably engaging the body canal when the device is positioned therein.

[1164] In one embodiment the anchorable reservoir has multiple suction ports and permits multiple folds of tissue to be captured in the suction ports with a single positioning of the device and attached together by a tissue securement mechanism such as a suture, staple or other form of tissue bonding. The suction ports may be arranged in a variety of configurations on the reservoir to best suit the desired resulting tissue orientation.

[1165] In some embodiments an anchorable reservoir comprises a tract stimulator and/or monitor IMD comprising a housing enclosing electrical stimulation and/or monitoring circuitry and a power source and an elongated flexible member extending from the housing to an active fixation mechanism adapted to be fixed into the GI tract wall is disclosed. After fixation is effected, the elongated flexible member bends into a preformed shape that presses the housing against the mucosa so that forces that would tend to dislodge the fixation mechanism are minimized. The IMD is fitted into an esophageal catheter lumen with the fixation mechanism aimed toward the catheter distal end opening whereby the bend in the flexible member is straightened. The catheter body is inserted through the esophagus into the GI tract cavity to direct the catheter distal end to the site of implantation and fix the fixation mechanism to the GI tract wall. The IMD is ejected from the lumen, and the flexible member assumes its bent configuration and lodges the hermetically sealed housing against the mucosa. A first stimulation/sense electrode is preferably an exposed conductive portion of the housing that is aligned with the bend of the flexible member so that it is pressed against the mucosa. A second stimulation/sense electrode is located at the fixation site.

[1166] In some embodiments a reservoir for sensing one or more parameters of a patient is anchored to a tissue at a specific site and is released from a device, using a single actuator operated during a single motion. As an example, a delivery device may anchor the capsule to the tissue site and release the reservoir from the delivery device during a single motion of the actuator.

[1167] In some embodiments a device is provided comprising: a reservoir configured to contain a fluid, the reservoir having at least one outlet through which the fluid may exit the reservoir; a fluid contained within the reservoir; a primary material contained within the reservoir and having a controllable effective concentration in the fluid; and at least one electromagnetically responsive control element located in the reservoir or in a wall of the reservoir and adapted for modifying the distribution of the primary material between a first active form carried in the fluid and a second form within the reservoir in response to an incident electromagnetic control signal, the effective concentration being the concentration of the first active form in the fluid, whereby fluid exiting the reservoir carries the primary material in the first active form at the effective concentration.

[1168] In some embodiments systems and methods are provided for implementing or deploying medical or veterinary devices or reservoirs (a) operable for anchoring at least partly within a digestive tract, (b) small enough to pass through the tract per vias naturales and including a wireless-control component, (c) having one or more protrusions positionable adjacent to a mucous membrane, (d) configured to facilitate redundant modes of anchoring, (e) facilitating a “primary” material supply deployable within a stomach for an extended and/or controllable period, (f) anchored by one or more adaptable extender modules supported by a subject's head or neck, and/or (g) configured to facilitate supporting at least a sensor within a subject's body lumen for up to a day or more.

[1169] In certain embodiments, the reservoir is attachable to an ingestible device. In certain embodiments, the ingestible device comprises a housing and the reservoir is attachable to the housing. In certain embodiments, the attachable reservoir is also an anchorable reservoir, such as an anchorable reservoir comprising one or more anchor systems for anchoring the reservoir at a particular location in the GI tract as disclosed hereinabove.

[1170] Accordingly, in certain embodiments, provided herein is an immune modulator (e.g., any of the immune modulators described herein) for use in a method of treating an inflammatory disease or condition that arises in a tissue originating from the endoderm as disclosed herein, wherein the immune modulator is contained in a reservoir suitable for attachment to a device housing, and wherein the method comprises attaching the reservoir to the device housing to form the ingestible device, prior to orally administering the ingestible device to the subject.

[1171] In certain embodiments, provided herein is an attachable reservoir containing an immune modulator (e.g., any of the immune modulators described herein) for use in a method of treating an inflammatory disease or condition that arises in a tissue originating from the endoderm, wherein the method comprises attaching the reservoir to a device housing to form an ingestible device and orally administering the ingestible device to a subject, wherein the immune modulator is released by device at a location in the gastrointestinal tract of the subject that is proximate to the intended site of release of the immune modulator.

[1172] In certain embodiments, provided herein is an attachable reservoir containing an immune modulator, wherein the reservoir is attachable to a device housing to form an ingestible device that is suitable for oral administration to a subject and that is capable of releasing the immune modulator at a location in the gastrointestinal tract of the subject that is proximate to the intended site of release.

[1173] In particular implementation the ingestible device includes cameras (e.g., video cameras) that affords inspection of the entire GI tract without discomfort or the need for sedation, thus avoiding many of the potential risks of conventional endoscopy. Video imaging can be used to help determine one or more characteristics of the GI tract. In some embodiments, the ingestible device 101 may comprise a camera for generating video imaging data of the GI tract which can be used to determine, among other things, the location of the device. Examples of video imaging capsules include Medtronic's PillCam™, Olympus' Endocapsule®, and IntroMedic's MicroCam™. For a review of imaging capsules, see Basar et al. “Ingestible Wireless Capsule Technology: A Review of Development and Future Indication” International Journal of Antennas and Propagation (2012); 1-14). Other imaging technologies implemented with the device 101 can include thermal imaging cameras, and those that employ ultrasound or Doppler principles to generate different images (see Chinese patent application CN104473611: “Capsule endoscope system having ultrasonic positioning function”.

[1174] Ingestible devices can be equipped with sources for generating reflected light, including light in the Ultraviolet, Visible, Near-infrared and/or Mid-infrared spectrum, and the corresponding detectors for spectroscopy and hyperspectral imaging. Likewise, autofluorescense may be used to characterize GI tissue (e.g., subsurface vessel information), or low-dose radiation (see Check-Cap™) can be used to obtain 3D reconstructed images.

### Device Components

[1175] An ingestible device in accordance with particular embodiments of the present invention may comprise a component made of a non-digestible material and contain the immune modulator (e.g., any of the immune modulators described herein). In some embodiments, the material is plastic.

[1176] It is envisaged that the device is single-use. The device is loaded with a drug prior to the time of administration. In some embodiments, it may be preferred that there is provided a medicinal product comprising the device pre-filled with the drug.

### Anchoring Components

[1177] Several systems may actively actuate and control the capsule position and orientation in different sections of the GI tract. Examples include leg-like or anchor-like mechanisms that can be deployed by an ingestible device to resist peristaltic forces in narrowed sections of the GI tract, such as the intestine, and anchor the device to a location. Other systems employ magnetic shields of different shapes that can interact with external magnetic fields to move the device. These mechanisms may be particularly useful in areas outside of the small intestine, like the cecum and large intestine.

[1178] An anchoring mechanism may be a mechanical mechanism. For example, a device may be a capsule comprising a plurality of legs configured to steer the capsule. The number of legs in the capsule may be, for example, two, four, six, eight, ten or twelve. The aperture between the legs of the device may be up to about 35 mm; about 30 to about 35 mm; about 35 to about 75 mm; or about 70 to about 75 mm. The contact area of each leg may be varied to reduce impact on the tissue. One or more motors in the capsule may each actuate a set of legs independently from the other. The motors may be battery-powered motors.

[1179] An anchoring mechanism may be a non-mechanical mechanism. For example, a device may be a capsule comprising a permanent magnet located inside the capsule. The capsule may be anchored at the desired location of the GI tract by an external magnetic field.

[1180] An anchoring mechanism may comprise a non-mechanical mechanism and a mechanical mechanism. For example, a device may be a capsule comprising one or more legs, one or more of which are coated with an adhesive material.

### Locomotion Components

[1181] Ingestible devices can be active or passive, depending on whether they have controlled or non-controlled locomotion. Passive (non-controlled) locomotion is more commonly used among ingestible devices given the challenges of implementing a locomotion module. Active (controlled) locomotion is more common in endoscopic ingestible capsules. For example, a capsule may comprise a miniaturized locomotion system (internal locomotion). Internal locomotion mechanisms may employ independent miniaturized propellers actuated by DC brushed motors, or the use of water jets. As an example, a mechanism may comprise flagellar or flap-based swimming mechanisms. As an example, a mechanism may comprise cyclic compression/extension shape-memory alloy (SMA) spring actuators and anchoring systems based on directional micro-needles. As an example, a mechanism may comprise six SMA actuated units, each provided with two SMA actuators for enabling bidirectional motion. As an example, a mechanism may comprise a motor adapted to electrically stimulating the GI muscles to generate a temporary restriction in the bowel.

[1182] As an example, a capsule may comprise a magnet and motion of the capsule is caused by an external magnetic field. For example, a locomotion system may comprise an ingestible capsule and an external magnetic field source. For example, the system may comprise an ingestible capsule and magnetic guidance equipment such as, for example, magnetic resonance imaging and computer tomography, coupled to a dedicated control interface.

[1183] In some embodiments drug release mechanisms may also be triggered by an external condition, such as temperature, pH, movement, acoustics, or combinations thereof.

### Use of an Endoscope or an Ingestible Device in Biopsy and Surgery

### Sampling

[1184] Ingestible devices may comprise a mechanism adapted to permit the collection of tissue samples. In some examples, this is achieved using electro-mechanical solutions to collect and store the sample inside an ingestible device. As an example, a biopsy mechanism may include a rotational tissue cutting razor fixed to a torsional spring or the use of microgrippers to fold and collect small biopsies. As an example, Over-the-scope clips (OTSC®) may be used to perform endoscopic surgery and/or biopsy. As an example of the methods disclosed herein, the method may comprise releasing an immune modulator (e.g., any of the immune modulators described herein) and collecting a sample inside the device. As an example, the method may comprise releasing an immune modulator and collecting a sample inside the device in a single procedure.

[1185] FIG. 21 illustrates an example ingestible device 2100 with multiple openings in the housing. The ingestible device 2100 has an outer housing with a first end 2102A, a second end 2102B, and a wall 2104 extending longitudinally from the first end 2102A to the second end 2102B. Ingestible device 2100 has a first opening 2106 in the housing, which is connected to a second opening 2108 in the housing. The first opening 2106 of the ingestible device 2100 is oriented substantially perpendicular to the second opening 2108, and the connection between the first opening 2106 and the second opening 2108 forms a curved chamber 2110 within the ingestible device 2100.

[1186] The overall shape of the ingestible device 2100, or any of the other ingestible devices discussed in this disclosure, may be similar to an elongated pill or capsule.

[1187] In some embodiments, a portion of the curved chamber 2110 may be used as a sampling chamber, which may hold samples obtained from the GI tract. In some embodiments the curved chamber 2110 is subdivided into sub-chambers, each of which may be separated by a series of one or more valves or interlocks.

[1188] In some embodiments, the first opening 2106, the second opening 2108, or the curved chamber 2110 include one or more of a hydrophilic or hydrophobic material, a sponge, a valve, or an air permeable membrane.

[1189] The use of a hydrophilic material or sponge may allow samples to be retained within the curved chamber 2110, and may reduce the amount of pressure needed for fluid to enter through the first opening 2106 and dislodge air or gas in the curved chamber 2110. Examples of hydrophilic materials that may be incorporated into the ingestible device 2100 include hydrophilic polymers such as polyvinyl alcohol, polyvinyl pyrrolidone, and the like. Similarly, materials that have undergone various types of treatments, such as plasma treatments, may have suitable hydrophilic properties, and may be incorporated into the investible device 2100. Sponges may be made of any suitable material or combination of materials, such as fibers of cotton, rayon, glass, polyester, polyethylene, polyurethane, and the like. Sponges generally may be made from commercially available materials, such as those produced by Porex©.

[1190] As discussed in more detail below, in some embodiments, the sponges may be treated in order to change their absorbency or to help preserve samples.

[1191] In some embodiments, the sponges may be cut or abraded to change their absorbency or other physical properties.

[1192] Hydrophobic materials located near the second opening 2108 may repel liquids, discouraging liquid samples from entering or exiting the curved chamber 2110 through the second opening 2108. This may serve a similar function as an air permeable membrane. Examples of hydrophobic materials which may be incorporated into the ingestible device 2100 include polycarbonate, acrylics, fluorocarbons, styrenes, certain forms of vinyl, and the like.

[1193] The various materials listed above are provided as examples, and are not limiting. In practice, any type of suitable hydrophilic, hydrophobic, or sample preserving material may be used in the ingestible device 2100.

[1194] In some embodiments, an ingestible device includes a moveable valve as a diaphragm valve, which uses a mechanical actuator to move a flexible diaphragm in order to seal or unseal an aperture in a second portion of an inlet region, which may effectively block or unblock the inlet region. However, it will be understood that, in some embodiments, the moveable valve may be a different type of valve. For example, in some embodiments the moveable valve may be replaced by a pumping mechanism. As another example, in some embodiments the moveable valve is replaced with an osmotic valve

[1195] A sampling chamber of an ingestible device can have an exit port to allow air or gas to exit the sampling chamber, while preventing at least a portion of the sample obtained by the ingestible device from exiting the sampling chamber. For example, the exit port may include a gas-permeable membrane. An ingestible device can include one-way valve as part of its exit port.

[1196] An ingestible device can include an outlet port connected to the volume within housing of the ingestible device. The outlet port may provide a path for the gas to exit the ingestible device and be released into the environment surrounding the ingestible device. This may prevent pressure from building up within the housing of the ingestible device. In some embodiments, an ingestible device does not include an outlet port, and the gas stays inside the volume of the ingestible device. In some embodiments, the outlet port may contain a gas permeable membrane, a one-way valve, a hydrophobic channel, or some other mechanism to avoid unwanted material, (e.g., fluids and solid particulates from within the GI tract), from entering the ingestible device through the outlet port.

[1197] In some embodiments, the ingestible device may include a sensor within or proximate to the sampling chamber. For example, this sensor may be used to detect various properties of a sample contained within the sampling chamber, or this sensor may be used to detect the results of an assay technique applied to the sample contained within the sampling chamber.

[1198] In some embodiments, a hydrophilic sponge is located within the sampling chamber, and the hydrophilic sponge may be configured to absorb the sample as the sample enters the sampling chamber. In some embodiments, the hydrophilic sponge fills a substantial portion of the sampling chamber, and holds the sample for an extended period of time. This may be particularly advantageous if the sample is collected from the ingestible device after the ingestible device exits the body. In some embodiments, the hydrophilic sponge is placed on only certain surfaces or fills only certain portions of the sampling chamber. For example, it may be possible to line certain walls (or all walls) of the sampling chamber with a hydrophilic sponge to assist in drawing in the sample, while leaving some (or none) of the walls of the sampling chamber uncovered. Leaving walls uncovered may allow the use of diagnostics or assay techniques that require a relatively un-obscured optical path.

[1199] In some embodiments, the ingestible device may include a sealed vacuum chamber connected to the exit port, or connected directly or indirectly to the sampling chamber. In some embodiments a pin valve may be used as a moveable valve (e.g., as moveable valve of ingestible device). In certain embodiments, a rotary valve may be used as a moveable valve (e.g., as moveable valve of ingestible device). In some embodiments, a flexible diaphragm, or diaphragm valve, may be used as a moveable valve (e.g., as moveable valve of ingestible device). In certain embodiments, a mechanism is near the diaphragm or in direct contact with the diaphragm. The spring mechanism may apply pressure to the diaphragm to oppose the pressure applied by the mechanical actuator, which may cause the flexible diaphragm to be moved into an open position when the mechanical actuator is not applying pressure to the flexible diaphragm. Additionally, this may ensure that the diaphragm valve remains open when the mechanical actuator is not applying pressure across the flexible diaphragm. In some embodiments, moving the mechanical actuator from a closed position to an open position causes a volume of the inlet region within the ingestible device to increase. This may cause the pressure within the inlet region to be reduced, generating suction to draw a sample into the inlet region. Similarly, moving the mechanical actuator from an open position to a closed position may cause the volume of the inlet region to be reduced. This may cause the pressure within the inlet region to be increased, pushing the sample out of the inlet region. Depending on the design of the inlet region, the mechanical actuator, and the moveable valve, this may push the sample into the sampling chamber rather than pushing the sample back through the opening in the ingestible device.

[1200] FIG. 22 depicts a cross-sectional view of a portion of the interior of ingestible device 3000. As shown in FIG. 22, the interior of ingestible device 3000 includes a valve system 3100 and a sampling system 3200. Valve system 3100 is depicted as having a portion that is flush with the opening 3018 so that valve system 3100 prevents fluid exterior to ingestible device 2000 from entering sampling system 3200. However, as described in more detail below with reference to FIGS. 22-27, valve system 3100 can change position so that valve system 3100 allows fluid exterior to ingestible device 3000 to enter sampling system 3200.

[1201] FIGS. 23 and 27 illustrate valve system 3100 in more detail. As shown in FIG. 23, valve system 3100 includes an actuation mechanism 3110, a trigger 3120, and a gate 3130. In FIGS. 23 and 7, a leg 3132 of gate 3130 is flush against, and parallel with, housing wall 3016 so that gate leg 3132 covers opening 3018 to prevent fluid exterior to ingestible device 3000 (e.g., fluid in the GI tract) from entering the interior of ingestible device 3000. A protrusion 3134 of gate 3130 engages a lip 3122 of trigger 3120. A peg 3124 of trigger 3120 engages a wax pot 3112 of actuation mechanism 3110. Referring to FIG. 27, a biasing mechanism 3140 includes a compression spring 3142 that applies an upward force on gate 3130. Biasing mechanism 3140 also includes a torsion spring 3144 that applies a force on trigger 3120 in the counter-clockwise direction. In FIGS. 23 and 27, the force applied by torsion spring 3144 is counter-acted by the solid wax in pot 3112, and the force applied by compression spring 3142 is counter-acted by lip 3122.

[1202] FIG. 24A and FIG. 24B show an embodiment of the manner in which actuation mechanism 3110 actuates movement of trigger 3120. Similar to FIGS. 23 and 27, FIG. 24A shows a configuration in which peg 3124 applies a force against solid wax pot 3112 due to torsion spring 3144, and in which the solid nature of wax pot 3112 resists the force applied by peg 3124. A control unit 3150 is in signal communication with valve system 3100. During use of ingestible device 3000, a control unit 3150 receives a signal, indicating that the position of valve system 3100 should change, e.g., so that ingestible device 3000 can take a sample of a fluid in the GI tract. Control unit 3150 sends a signal that causes a heating system 3114 of actuation system 3100 to heat the wax in pot 3112 so that the wax melts. As shown in FIG. 24B, the melted wax is not able to resist the force applied by peg 3124 so that, under the force of torsion spring 3144, trigger 3120 moves in a counter-clockwise fashion.

[1203] FIGS. 25A and 25B illustrate the interaction of trigger 3120 and gate 3130 before and after actuation. As shown in FIG. 25A, when wax pot 3112 is solid (corresponding to the configuration shown in FIG. 24A), protrusion 3134 engages lip 3122, which prevents the force of compression spring 3142 from moving gate 3130 upward. As shown in FIG. 25B, when the wax in pot 3112 melts (FIG. 24B), trigger 3120 moves counter-clockwise, and lip 3122 disengages from protrusion 3134. This allows the force of compression spring 3142 to move gate 3130 upward. As seen by comparing FIG. 25A to FIG. 25B, the upward movement of gate 3130 results in an upward movement of an opening 3136 in gate leg 3132.

[1204] FIGS. 26A and 26B illustrate the impact of the upward movement of opening 3136 on the ability of ingestible device 3000 to obtain a sample. As shown in FIG. 26A, when the wax in pot 3112 is solid (FIGS. 24A and 25A), opening 3136 in is not aligned with opening 3018 in wall 3016 of ingestible device 3000. Instead, gate leg 3132 covers opening 3018 and blocks fluid from entering the interior of ingestible device 3000. As shown in FIG. 26B, when the wax in pot 3112 is melted and trigger 3120 and gate 3130 have moved (FIGS. 24B and 42B), opening 3136 in gate 3130 is aligned with opening 3018 in wall 3016. In this configuration, fluid that is exterior to ingestible device 3000 (e.g., in the GI tract) can enter the interior of ingestible device 3000 via openings 3018 and 3036.

[1205] FIG. 27 illustrates a more detailed view of ingestible device 3000 including valve system 3100 and sampling system 3200.

[1206] While the foregoing description is made with regard to a valve system having one open position and one closed position (e.g., a two-stage valve system), the disclosure is not limited in this sense. Rather, the concepts described above with regard to a two stage valve system can be implemented with a valve system have more than two stages (e.g., three stages, four stages, five stages, etc.).

[1207] As noted above in addition to a valve system, an ingestible device includes a sampling system. FIG. 28 illustrates a partial cross sectional view of ingestible device 3000 with sampling system 3200 and certain components of valve system 3100. Sampling system 3200 includes a series of sponges configured to absorb fluid from an opening, move the fluid to a location within the housing, and prepare the fluid for testing. Preparation for testing may include filtering the fluid and combining the fluid with a chemical assay. The assay may be configured to dye cells in the filtered sample. The series of sponges includes a wicking sponge 3210, a transfer sponge 3220, a volume sponge 3230, and an assay sponge 3240. Sampling system 3200 also includes a membrane 3270 located between assay sponge 3240 and a vent 3280 for gases to leave sampling system 3200. A cell filter 3250 is located between distal end 3214 of wicking sponge 3210 and a first end 3222 of transfer sponge 3220. Membrane 3270 is configured to allow one or more gases to leave sampling system 3200 via an opening 3280, while maintaining liquid in sampling system 3200.

[1208] FIG. 29 is a highly schematic illustration of an ingestible device 4000 that contains multiple different systems that cooperate for obtaining a sample and analyzing a sample, e.g., within the GI tract of a subject. Ingestible device 4000 includes a power system 4100 (e.g., one or more batteries), configured to power an electronics system 4200 (e.g., including a control system, optionally in signal communication with an external base station), a valve system 4300, a sampling system 4400, and an analytic system 4500. Exemplary analytical systems include assay systems, such as, for example, optical systems containing one or more sources of radiation and/or one more detectors.

[1209] Some or all of the sponges of the above-described sampling systems may contain one or more preservatives (see discussion above). Typically, the assay sponge and/or the volume sponge 3230 and/or the transfer sponge contain one or more preservatives. Typically, the preservative(s) are selected based on the analyte of interest, e.g., an analyte (such as a protein biomarker) for a GI disorder.

### Communication Systems

[1210] An ingestible device may be equipped with a communication system adapted to transmit and/or receive data, including imaging and/or localization data. As an example, a communication system may employ radiofrequency transmission. Ingestible devices using radiofrequency communication are attractive because of their efficient transmission through the layers of the skin. This is especially true for low frequency transmission (UHF-433 ISM and lower, including the Medical Device Radio Communication Service band (MDRS) band 402-406 MHz). In another embodiment, acoustics are used for communications, including the transmission of data. For example, an ingestible capsule may be able to transmit information by applying one or more base voltages to an electromechanical transducer or piezoelectric (e.g., PZT, PVDF, etc.) device to cause the piezoelectric device to ring at particular frequencies, resulting in an acoustic transmission. A multi-sensor array for receiving the acoustic transmission may include a plurality of acoustic transducers that receive the acoustic transmission from a movable device such as an ingestible capsule as described in U.S. patent application Ser. No. 11/851,214 filed Sep. 6, 2007, incorporated by reference herein in its entirety.

[1211] As an example, a communication system may employ human body communication technology. Human body communication technology uses the human body as a conductive medium, which generally requires a large number of sensor electrodes on the skin. As an example, a communication system may integrate a data storage system.

### Environmental Sensors

[1212] In some embodiments the device may comprise environmental sensors to measure pH, temperature, transit times, or combinations thereof. Other examples of environmental sensors include, but are not limited to a capacitance sensor, an impedance sensor, a heart rate sensor, acoustic sensor such as a microphone or hydrophone, image sensor, and/or a movement sensor. In one embodiment, the ingestible device comprises a plurality of different environmental sensors for generating different kinds of environmental data.

[1213] In order to avoid the problem of capsule retention, a thorough past medical and surgical history should be undertaken. In addition, several other steps have been proposed, including performing investigations such as barium follow-through. In cases where it is suspected that there is a high risk of retention, the patient is given a patency capsule a few days before swallowing an ingestible device. Any dissolvable non-endoscopic capsule may be used to determine the patency of the GI tract. The patency capsule is usually the same size as the ingestible device and can be made of cellophane. In some embodiments, the patency capsule contains a mixture of barium and lactose, which allows visualization by x-ray. The patency capsule may also include a radiotag or other label, which allows for it to be detected by radio-scanner externally. The patency capsule may comprise wax plugs, which allow for intestinal fluid to enter and dissolve the content, thereby dividing the capsule into small particles.

[1214] Accordingly, in some embodiments, the methods herein comprise (a) identifying a subject having an inflammatory disease or condition that arises in a tissue originating from the endoderm and (b) evaluating the subject for suitability to treatment. In some embodiments, the methods herein comprise evaluating for suitability to treatment a subject identified as having a disease or condition that arises in a tissue originating from the endoderm. In some embodiments, evaluating the subject for suitability to treatment comprises determining the patency of the subject's GI tract.

[1215] In some embodiments, an ingestible device comprises a tissue anchoring mechanism for anchoring the ingestible device to a subject's tissue. For example, an ingestible device could be administered to a subject and once it reaches the desired location for release of the immune modulator (e.g., any of the immune modulators described herein), the tissue attachment mechanism can be activated or deployed such that the ingestible device, or a portion thereof, is anchored to the desired location. In some embodiments, the tissue anchoring mechanism is reversible such that after initial anchoring, the tissue attachment device is retracted, dissolved, detached, inactivated or otherwise rendered incapable of anchoring the ingestible device to the subject's tissue. In some embodiments the attachment mechanism is placed endoscopically.

[1216] In some embodiments, a tissue anchoring mechanism comprises an osmotically-driven sucker. In some embodiments, the osmotically-driven sucker comprises a first valve on the near side of the osmotically-driven sucker (e.g., near the subject's tissue) and a second one-way valve that is opened by osmotic pressure on the far side of the osmotically-driven sucker, and an internal osmotic pump system comprising salt crystals and semi-permeable membranes positioned between the two valves. In such embodiments, osmotic pressure is used to adhere the ingestible device to the subject's tissue without generating a vacuum within the ingestible capsule. After the osmotic system is activated by opening the first valve, fluid is drawn in through the sucker and expelled through the second burst valve. Fluid continues to flow until all the salt contained in the sucker is dissolved or until tissue is drawn into the sucker. As liminal fluid is drawn through the osmotic pump system, solutes build up between the tissue and the first valve, reducing osmotic pressure. In some embodiments, the solute buildup stalls the pump before the tissue contacts the valve, preventing tissue damage. In some embodiments, a burst valve is used on the far side of the osmotically-driven sucker rather than a one-way valve, such that luminal fluid eventually clears the saline chamber and the osmotic flow reverses, actively pushing the subject's tissue out of the sucker. In some embodiments, the ingestible device may be anchored to the interior surface of tissues forming the GI tract of a subject. In one embodiment, the ingestible device comprises a connector for anchoring the device to the interior surface of the GI tract. The connector may be operable to ingestible device to the interior surface of the GI tract using an adhesive, negative pressure and/or fastener.

[1217] In some embodiments a device comprises a tract stimulator and/or monitor IMD comprising a housing enclosing electrical stimulation and/or monitoring circuitry and a power source and an elongated flexible member extending from the housing to an active fixation mechanism adapted to be fixed into the GI tract wall is disclosed. After fixation is effected, the elongated flexible member bends into a preformed shape that presses the housing against the mucosa so that forces that would tend to dislodge the fixation mechanism are minimized. The IMD is fitted into an esophageal catheter lumen with the fixation mechanism aimed toward the catheter distal end opening whereby the bend in the flexible member is straightened. The catheter body is inserted through the esophagus into the GI tract cavity to direct the catheter distal end to the site of implantation and fix the fixation mechanism to the GI tract wall. The IMD is ejected from the lumen, and the flexible member assumes its bent configuration and lodges the hermetically sealed housing against the mucosa. A first stimulation/sense electrode is preferably an exposed conductive portion of the housing that is aligned with the bend of the flexible member so that it is pressed against the mucosa. A second stimulation/sense electrode is located at the fixation site.

[1218] In some embodiments a device includes a fixation mechanism to anchor the device to tissue within a body lumen, and a mechanism to permit selective de-anchoring of the device from the tissue anchoring site without the need for endoscopic or surgical intervention. An electromagnetic device may be provided to mechanically actuate the de-anchoring mechanism. Alternatively, a fuse link may be electrically blown to de-anchor the device. As a further alternative, a rapidly degradable bonding agent may be exposed to a degradation agent to de-anchor the device from a bonding surface within the body lumen.

[1219] In some embodiments a device is as disclosed in patent publication WO2015112575A1, incorporated by reference herein in its entirety. The patent publication is directed to a gastrointestinal sensor implantation system. In some embodiments an orally-administrable capsule comprises a tissue capture device or reservoir removably coupled to the orally-administrable capsule, where the tissue capture device including a plurality of fasteners for anchoring the tissue capture device to gastrointestinal tissue within a body

[1220] In some embodiments, the ingestible device contains an electric energy emitting means, a radio signal transmitting means, a medicament storage means and a remote actuatable medicament releasing means. The capsule signals a remote receiver as it progresses through the alimentary tract in a previously mapped route and upon reaching a specified site is remotely triggered to release a dosage of medicament. Accordingly, in some embodiments, releasing the agentis triggered by a remote electromagnetic signal.

[1221] In some embodiments, the ingestible device includes a housing introducible into a body cavity and of a material insoluble in the body cavity fluids, but formed with an opening covered by a material which is soluble in body cavity fluids. A diaphragm divides the interior of the housing into a medication chamber including the opening, and a control chamber. An electrolytic cell in the control chamber generates a gas when electrical current is passed therethrough to deliver medication from the medication chamber through the opening into the body cavity at a rate controlled by the electrical current. Accordingly, in some embodiments, releasing the immune modulator is triggered by generation in the composition of a gas in an amount sufficient to expel the immune modulator.

[1222] In some embodiments, the ingestible device includes an oral drug delivery device having a housing with walls of water permeable material and having at least two chambers separated by a displaceable membrane. The first chamber receives drug and has an orifice through which the drug is expelled under pressure. The second chamber contains at least one of two spaced apart electrodes forming part of an electric circuit which is closed by the ingress of an aqueous ionic solution into the second chamber. When current flows through the circuit, gas is generated and acts on the displaceable membrane to compress the first chamber and expel the active ingredient through the orifice for progressive delivery to the gastrointestinal tract.

[1223] In some embodiments, the ingestible device includes an ingestible device for delivering a substance to a chosen location in the GI tract of a mammal includes a receiver of electromagnetic radiation for powering an openable part of the device to an opened position for dispensing of the substance. The receiver includes a coiled wire that couples the energy field, the wire having an air or ferrite core. In a further embodiment the invention includes an apparatus for generating the electromagnetic radiation, the apparatus including one or more pairs of field coils supported in a housing. The device optionally includes a latch defined by a heating resistor and a fusible restraint. The device may also include a flexible member that may serve one or both the functions of activating a transmitter circuit to indicate dispensing of the substance; and restraining of a piston used for expelling the substance.

[1224] In some embodiments, the ingestible device includes an ingestible device for delivering a substance to a chosen location in the GI tract of a mammal includes a receiver of electromagnetic radiation for powering an openable part of the device to an opened position for dispensing of the substance. The receiver includes a coiled wire that couples the energy field, the wire having an air or ferrite core. In a further embodiment the invention includes an apparatus for generating the electromagnetic radiation, the apparatus including one or more pairs of field coils supported in a housing. The device optionally includes a latch defined by a heating resistor and a fusible restraint. The device may also include a flexible member that may serve one or both the functions of activating a transmitter circuit to indicate dispensing of the substance; and restraining of a piston used for expelling the substance.

[1225] In some embodiments, the ingestible device is a device a swallowable capsule. A sensing module is disposed in the capsule. A bioactive substance dispenser is disposed in the capsule. A memory and logic component is disposed in the capsule and in communication with the sensing module and the dispenser.

[1226] In some embodiments, localized administration is implemented via an electronic probe which is introduced into the intestinal tract of a living organism and which operates autonomously therein, adapted to deliver one or more therapy agents. In one embodiment, the method includes loading the probe with one or more therapy agents, and selectively releasing the agents from the probe at a desired location of the intestinal tract in order to provide increased efficacy over traditional oral ingestion or intravenous introduction of the agent(s).

[1227] In some embodiments, the ingestible device includes electronic control means for dispensing the drug substantially to the intended site in the GI tract, according to a pre-determined drug release profile obtained prior to administration from the specific mammal. Accordingly, in some embodiments, releasing the immune modulator (e.g., any of the immune modulators described herein) is triggered by an electromagnetic signal generated within the device. The releasing may occur according to a pre-determined drug release profile.

[1228] In some embodiments, the ingestible device can include at least one guide tube, one or more tissue penetrating members positioned in the guide tube, a delivery member, an actuating mechanism and a release element. The release element degrades upon exposure to various conditions in the intestine so as to release and actuate the actuating mechanism. Embodiments of the invention are particularly useful for the delivery of drugs which are poorly absorbed, tolerated and/or degraded within the GI tract.

[1229] In some embodiments, the ingestible device includes an electronic pill comprising at least one reservoir with a solid powder or granulate medicament or formulation, a discharge opening and an actuator responsive to control circuitry for displacing medicine from the reservoir to the discharge opening. The medicament or formulation comprises a dispersion of one or more active ingredients—e.g., solids in powder or granulate form—in an inert carrier matrix. Optionally, the active ingredients are dispersed using intestinal moisture absorbed into the pill via a semi-permeable wall section.

[1230] In some embodiments, the ingestible device includes a sensor comprising a plurality of electrodes having a miniature size and a lower power consumption and a coating exterior to the electrodes, wherein the coating interacts with a target condition thereby producing a change in an electrical property of the electrodes, wherein the change is transduced into an electrical signal by the electrodes. Accordingly, in some embodiments, releasing the immune modulators is triggered by an electric signal by the electrodes resulting from the interaction of the coating with the intended site of release. Further provided herein is a system for medication delivery comprising such sensor and a pill.

[1231] In some embodiments, the ingestible device includes an electronic pill comprising a plurality of reservoirs, each of the reservoirs comprising a discharge opening covered by a removable cover. The pill comprises at least one actuator responsive to control circuitry for removing the cover from the discharge opening. The actuator can for example be a spring loaded piston breaking a foil cover when dispensing the medicament. Alternatively, the cover can be a rotatable disk or cylinder with an opening which can be brought in line with the discharge opening of a reservoir under the action of the actuator.

[1232] In some embodiments, the ingestible device includes an electronically and remotely controlled pill or medicament delivery system. The pill includes a housing; a reservoir for storing a medicament; an electronically controlled release valve or hatch for dispensing one or more medicaments stored in the reservoir while traversing the gastrointestinal tract; control and timing circuitry for opening and closing the valve; and a battery. The control and timing circuitry opens and closes the valve throughout a dispensing time period in accordance with a preset dispensing timing pattern which is programmed within the control and timing circuitry. RF communication circuitry receives control signals for remotely overriding the preset dispensing timing pattern, reprogramming the control and timing circuitry or terminating the dispensing of the medicament within the body. The pill includes an RFID tag for tracking, identification, inventory and other purposes.

[1233] In some embodiments, the ingestible device includes an electronic capsule which has a discrete drive element comprising: a housing, electronics for making the electronic capsule operable, a pumping mechanism for dosing and displacing a substance, a power source for powering the electronic capsule and enabling the electronics and the pumping mechanism to operate, and a locking mechanism; and a discrete payload element comprising: a housing, a reservoir for storing the substance, one or more openings in the housing for releasing the substance from the reservoir and a locking mechanism for engaging the drive element locking mechanism. Engagement of the drive element locking mechanism with the payload element locking mechanism secures the drive element to the payload element, thereby making the electronic capsule operable and specific.

[1234] In some embodiments, the ingestible device may be a mucoadhesive device configured for release of an active agent.

[1235] In some embodiments, the ingestible device includes an apparatus that includes an ingestible medical treatment device, which is configured to initially assume a contracted state having a volume of less than 4 cm³. The device includes a gastric anchor, which initially assumes a contracted size, and which is configured to, upon coming in contact with a liquid, expand sufficiently to prevent passage of the anchor through a round opening having a diameter of between 1 cm and 3 cm. The device also includes a duodenal unit, which is configured to pass through the opening, and which is coupled to the gastric anchor such that the duodenal unit is held between 1 cm and 20 cm from the gastric anchor.

[1236] In some embodiments, the ingestible device includes a medical robotic system and method of operating such comprises taking intraoperative external image data of a patient anatomy, and using that image data to generate a modeling adjustment for a control system of the medical robotic system (e.g., updating anatomic model and/or refining instrument registration), and/or adjust a procedure control aspect (e.g., regulating substance or therapy delivery, improving targeting, and/or tracking performance).

[1237] In one embodiment the ingestible device may also include one or more environmental sensors. Environmental sensor may be used to generate environmental data for the environment external to device in the gastrointestinal (GI) tract of the subject. In some embodiments, environmental data is generated at or near the location within the GI tract of the subject where a drug is delivered. Examples of environmental sensor include, but are not limited to a capacitance sensor, a temperature sensor, an impedance sensor, a pH sensor, a heart rate sensor, acoustic sensor, image sensor (e.g., a hydrophone), and/or a movement sensor (e.g., an accelerometer). In one embodiment, the ingestible device comprises a plurality of different environmental sensors for generating different kinds of environmental data.

[1238] In one embodiment, the image sensor is a video camera suitable for obtaining images in vivo of the tissues forming the GI tract of the subject. In one embodiment, the environmental data is used to help determine one or more characteristics of the GI tract, including the location of disease (e.g., presence or location of inflamed tissue and/or lesions associated with inflammatory bowel disease). In some embodiments, the ingestible device may comprise a camera for generating video imaging data of the GI tract which can be used to determine, among other things, the location of the device.

[1239] In another embodiment, the ingestible device described herein may be localized using a gamma scintigraphy technique or other radio-tracker technology as employed by Phaeton Research's Enterion™ capsule (See Teng, Renli, and Juan Maya. “Absolute bioavailability and regional absorption of ticagrelor in healthy volunteers.” Journal of Drug Assessment 3.1 (2014): 43-50), or monitoring the magnetic field strength of permanent magnet in the ingestible device (see T. D. Than, et al., “A review of localization systems for robotic endoscopic capsules,” IEEE Trans. Biomed. Eng., vol. 59, no. 9, pp. 2387-2399, September 2012).

[1240] In one embodiment, the one or more environmental sensors measure pH, temperature, transit times, or combinations thereof.

[1241] In some embodiments, releasing the immune modulator (e.g., any of the immune modulators described herein) is dependent on the pH at or in the vicinity of the location. In some embodiments the pH in the jejunum is from 6.1 to 7.2, such as 6.6. In some embodiments the pH in the mid small bowel is from 7.0 to 7.8, such as 7.4. In some embodiments the pH in the ileum is from 7.0 to 8.0, such as 7.5. In some embodiments the pH in the right colon is from 5.7 to 7.0, such as 6.4. In some embodiments the pH in the mid colon is from 5.7 to 7.4, such as 6.6. In some embodiments the pH in the left colon is from 6.3 to 7.7, such as 7.0. In some embodiments, the gastric pH in fasting subjects is from about 1.1 to 2.1, such as from 1.4 to 2.1, such as from 1.1 to 1.6, such as from 1.4 to 1.6. In some embodiments, the gastric pH in fed subjects is from 3.9 to 7.0, such as from 3.9 to 6.7, such as from 3.9 to 6.4, such as from 3.9 to 5.8, such as from 3.9 to 5.5, such as from 3.9 to 5.4, such as from 4.3 to 7.0, such as from 4.3 to 6.7, such as from 4.3 to 6.4, such as from 4.3 to 5.8, such as from 4.3 to 5.5, such as from 4.3 to 5.4. In some embodiments, the pH in the duodenum is from 5.8 to 6.8, such as from 6.0 to 6.8, such as from 6.1 to 6.8, such as from 6.2 to 6.8, such as from 5.8 to 6.7, such as from 6.0 to 6.7, such as from 6.1 to 6.7, such as from 6.2 to 6.7, such as from 5.8 to 6.6, such as from 6.0 to 6.6, such as from 6.1 to 6.6, such as from 6.2 to 6.6, such as from 5.8 to 6.5, such as from 6.0 to 6.5, such as from 6.1 to 6.5, such as from 6.2 to 6.5.

[1242] In some embodiments, releasing the immune modulator (e.g., any of the immune modulators described herein) is not dependent on the pH at or in the vicinity of the location. In some embodiments, releasing the immune modulator (e.g., any of the immune modulators described herein) is triggered by degradation of a release component located in the capsule. In some embodiments, the release of the immune modulator is not triggered by degradation of a release component located in the capsule. In some embodiments, the release of the immune modulator is not dependent on enzymatic activity at or in the vicinity of the location. In some embodiments, releasing the immune modulator is not dependent on bacterial activity at or in the vicinity of the location.

[1243] In some embodiments, the pharmaceutical composition is an ingestible device, comprising:

[1244] a housing defined by a first end, a second end substantially opposite from the first end, and a wall extending longitudinally from the first end to the second end;

[1245] a reservoir located within the housing and containing the immune modulator (e.g., any of the immune modulators described herein),

[1246] wherein a first end of the reservoir is attached to the first end of the housing;

[1247] a mechanism for releasing the immune modulator from the reservoir;

[1248] and;

[1249] an exit valve configured to allow the immune modulator to be released out of the housing from the reservoir.

[1250] In some embodiments, the ingestible device further comprises:

[1251] an electronic component located within the housing; and

[1252] a gas generating cell located within the housing and adjacent to the electronic component,

[1253] wherein the electronic component is configured to activate the gas generating cell to generate gas.

[1254] In some embodiments, the ingestible device further comprises:

a safety device placed within or attached to the housing,

[1255] wherein the safety device is configured to relieve an internal pressure within the housing when the internal pressure exceeds a threshold level.

[1256] In some embodiments, the pharmaceutical composition is an ingestible device, comprising:

[1257] a housing defined by a first end, a second end substantially opposite from the first end, and a wall extending longitudinally from the first end to the second end;

[1258] an electronic component located within the housing;

[1259] a gas generating cell located within the housing and adjacent to the electronic component,
[1260] wherein the electronic component is configured to activate the gas generating cell to generate gas;

[1261] a reservoir located within the housing,
[1262] wherein the reservoir stores a dispensable substance and a first end of the reservoir is attached to the first end of the housing;

[1263] an exit valve located at the first end of the housing,
[1264] wherein the exit valve is configured to allow the dispensable substance to be released out of the first end of the housing from the reservoir; and

[1265] a safety device placed within or attached to the housing,
[1266] wherein the safety device is configured to relieve an internal pressure within the housing when the internal pressure exceeds a threshold level.

[1267] In some embodiments, the pharmaceutical composition is an ingestible device, comprising:

[1268] a housing defined by a first end, a second end substantially opposite from the first end, and a wall extending longitudinally from the first end to the second end;

[1269] an electronic component located within the housing,

[1270] a gas generating cell located within the housing and adjacent to the electronic component,
[1271] wherein the electronic component is configured to activate the gas generating cell to generate gas;

[1272] a reservoir located within the housing,
[1273] wherein the reservoir stores a dispensable substance and a first end of the reservoir is attached to the first end of the housing;

[1274] an injection device located at the first end of the housing,
[1275] wherein the jet injection device is configured to inject the dispensable substance out of the housing from the reservoir; and

[1276] a safety device placed within or attached to the housing,
[1277] wherein the safety device is configured to relieve an internal pressure within the housing.

[1278] In some embodiments, the pharmaceutical composition is an ingestible device, comprising:

[1279] a housing defined by a first end, a second end substantially opposite from the first end, and a wall extending longitudinally from the first end to the second end;

[1280] an optical sensing unit located on a side of the housing,
[1281] wherein the optical sensing unit is configured to detect a reflectance from an environment external to the housing;

[1282] an electronic component located within the housing;

[1283] a gas generating cell located within the housing and adjacent to the electronic component,
[1284] wherein the electronic component is configured to activate the gas generating cell to generate gas in response to identifying a location of the ingestible device based on the reflectance;

[1285] a reservoir located within the housing,
[1286] wherein the reservoir stores a dispensable substance and a first end of the reservoir is attached to the first end of the housing;

[1287] a membrane in contact with the gas generating cell and configured to move or deform into the reservoir by a pressure generated by the gas generating cell; and

[1288] a dispensing outlet placed at the first end of the housing,
[1289] wherein the dispensing outlet is configured to deliver the dispensable substance out of the housing from the reservoir.

[1290] In one embodiment, drug delivery is triggered when it encounters the site of release in the GI tract.

[1291] In one embodiment, the one or more environmental sensors measure pH, temperature, transit times, or combinations thereof.

[1292] In some embodiments, releasing the immune modulator (e.g., any of the immune modulators described herein) is dependent on the pH at or in the vicinity of the location. In some embodiments the pH in the jejunum is from 6.1 to 7.2, such as 6.6. In some embodiments the pH in the mid small bowel is from 7.0 to 7.8, such as 7.4. In some embodiments the pH in the ileum is from 7.0 to 8.0, such as 7.5. In some embodiments the pH in the right colon is from 5.7 to 7.0, such as 6.4. In some embodiments the pH in the mid colon is from 5.7 to 7.4, such as 6.6. In some embodiments the pH in the left colon is from 6.3 to 7.7, such as 7.0. In some embodiments, the gastric pH in fasting subjects is from about 1.1 to 2.1, such as from 1.4 to 2.1, such as from 1.1 to 1.6, such as from 1.4 to 1.6. In some embodiments, the gastric pH in fed subjects is from 3.9 to 7.0, such as from 3.9 to 6.7, such as from 3.9 to 6.4, such as from 3.9 to 5.8, such as from 3.9 to 5.5, such as from 3.9 to 5.4, such as from 4.3 to 7.0, such as from 4.3 to 6.7, such as from 4.3 to 6.4, such as from 4.3 to 5.8, such as from 4.3 to 5.5, such as from 4.3 to 5.4. In some embodiments, the pH in the duodenum is from 5.8 to 6.8, such as from 6.0 to 6.8, such as from 6.1 to 6.8, such as from 6.2 to 6.8, such as from 5.8 to 6.7, such as from 6.0 to 6.7, such as from 6.1 to 6.7, such as from 6.2 to 6.7, such as from 5.8 to 6.6, such as from 6.0 to 6.6, such as from 6.1 to 6.6, such as from 6.2 to 6.6, such as from 5.8 to 6.5, such as from 6.0 to 6.5, such as from 6.1 to 6.5, such as from 6.2 to 6.5.

[1293] In some embodiments, releasing the immune modulator is not dependent on the pH at or in the vicinity of the location. In some embodiments, releasing the immune modulator is triggered by degradation of a release component located in the capsule. In some embodiments, the immune modulator is not triggered by degradation of a release component located in the capsule. In some embodiments, wherein releasing the immune modulator is not dependent on enzymatic activity at or in the vicinity of the location. In some embodiments, releasing the immune modulator is not dependent on bacterial activity at or in the vicinity of the location.

[1294] In some embodiments, the pharmaceutical composition is an ingestible device, comprising:

[1295] a housing defined by a first end, a second end substantially opposite from the first end, and a wall extending longitudinally from the first end to the second end;

[1296] a reservoir located within the housing and containing the immune modulator,

[1297] wherein a first end of the reservoir is attached to the first end of the housing;

[1298] a mechanism for releasing the immune modulator from the reservoir;

[1299] and;

[1300] an exit valve configured to allow the immune modulator to be released out of the housing from the reservoir.

[1301] In some embodiments, the ingestible device further comprises:

[1302] an electronic component located within the housing; and

[1303] a gas generating cell located within the housing and adjacent to the electronic component,

[1304] wherein the electronic component is configured to activate the gas generating cell to generate gas.

[1305] In some embodiments, the ingestible device further comprises: a safety device placed within or attached to the housing,
[1306] wherein the safety device is configured to relieve an internal pressure within the housing when the internal pressure exceeds a threshold level.
   In some embodiments, the pharmaceutical composition is an ingestible device, comprising:

[1307] a housing defined by a first end, a second end substantially opposite from the first end, and a wall extending longitudinally from the first end to the second end;

[1308] an electronic component located within the housing;

[1309] a gas generating cell located within the housing and adjacent to the electronic component,
[1310] wherein the electronic component is configured to activate the gas generating cell to generate gas;

[1311] a reservoir located within the housing,
[1312] wherein the reservoir stores a dispensable substance and a first end of the reservoir is attached to the first end of the housing;

[1313] an exit valve located at the first end of the housing,
[1314] wherein the exit valve is configured to allow the dispensable substance to be released out of the first end of the housing from the reservoir; and

[1315] a safety device placed within or attached to the housing,
[1316] wherein the safety device is configured to relieve an internal pressure within the housing when the internal pressure exceeds a threshold level.

[1317] In some embodiments, the pharmaceutical composition is an ingestible device, comprising:

[1318] a housing defined by a first end, a second end substantially opposite from the first end, and a wall extending longitudinally from the first end to the second end;

[1319] an electronic component located within the housing,

[1320] a gas generating cell located within the housing and adjacent to the electronic component,
[1321] wherein the electronic component is configured to activate the gas generating cell to generate gas;

[1322] a reservoir located within the housing,
[1323] wherein the reservoir stores a dispensable substance and a first end of the reservoir is attached to the first end of the housing;

[1324] an injection device located at the first end of the housing,
[1325] wherein the jet injection device is configured to inject the dispensable substance out of the housing from the reservoir; and

[1326] a safety device placed within or attached to the housing,
[1327] wherein the safety device is configured to relieve an internal pressure within the housing.

[1328] In some embodiments, the pharmaceutical composition is an ingestible device, comprising:

[1329] a housing defined by a first end, a second end substantially opposite from the first end, and a wall extending longitudinally from the first end to the second end;

[1330] an optical sensing unit located on a side of the housing,
[1331] wherein the optical sensing unit is configured to detect a reflectance from an environment external to the housing;

[1332] an electronic component located within the housing;

[1333] a gas generating cell located within the housing and adjacent to the electronic component,
[1334] wherein the electronic component is configured to activate the gas generating cell to generate gas in response to identifying a location of the ingestible device based on the reflectance;

[1335] a reservoir located within the housing,
[1336] wherein the reservoir stores a dispensable substance and a first end of the reservoir is attached to the first end of the housing;

[1337] a membrane in contact with the gas generating cell and configured to move or deform into the reservoir by a pressure generated by the gas generating cell; and

[1338] a dispensing outlet placed at the first end of the housing,
[1339] wherein the dispensing outlet is configured to deliver the dispensable substance out of the housing from the reservoir.

[1340] In some embodiments, the pharmaceutical composition is an ingestible device as disclosed in U.S. Patent Application Ser. No. 62/385,553, incorporated by reference herein in its entirety.

[1341] In some embodiments, the pharmaceutical composition is an ingestible device as disclosed in the following applications, each of which is incorporated by reference herein in its entirety:

U.S. Ser. No. 14/460,893; 15/514,413; 62/376,688; 62/385,344; 62/478,955; 62/434,188; 62/434,320; 62/431,297; 62/434,797; 62/480,187; 62/502,383; and 62/540,873.

[1342] In some embodiments, the pharmaceutical composition is an ingestible device comprising a localization mechanism as disclosed in international patent application PCT/US2015/052500, incorporated by reference herein in its entirety.

[1343] In some embodiments, the pharmaceutical composition is not a dart-like dosage form.

[1344] In some embodiments provided herein is an ingestible device, comprising:

[1345] an immune modulator;

[1346] one or more processing devices; and

[1347] one more machine readable hardware storage devices storing instructions that are executable by the one or more processing devices to determine a location of the ingestible device in a portion of a GI tract of a subject to an accuracy of at least 85%. In some embodiments, the accuracy is at least 90%. In some embodiments, the accuracy is at least 95%. In some embodiments, the accuracy is at least 97%. In some embodiments, the accuracy is at least 98%. In some embodiments, the accuracy is at least 99%. In some embodiments, the accuracy is 100%. In some embodiments, the portion of the GI tract of the subject comprises the duodenum. In some embodiments, the portion of the GI tract of the subject comprises the jejunum. In some embodiments, the portion of the GI tract of the subject comprises the terminal ileum, cecum and colon. In some embodiments, the ingestible device further comprises first and second light sources, wherein the first light source is configured to emit light at a first wavelength, and the second light source is configured to emit light at a second wavelength different from the first wavelength. In some embodiments, the ingestible device further comprises first and second detectors, wherein the first detector is configured to detect light at the first wavelength, and the second detector is configured to detect light at the second wavelength.

[1348] In some embodiments, provided herein is an ingestible device, comprising:

[1349] an immune modulator;

[1350] one or more processing devices; and

[1351] one more machine readable hardware storage devices storing instructions that are executable by the one or more processing devices to determine that the ingestible device is in the cecum of a subject to an accuracy of at least 70%. In some embodiments, the accuracy is at least 75%. In some embodiments, the accuracy is at least 80%. In some embodiments, the accuracy is at least 85%. In some embodiments, the accuracy is at least 88%. In some embodiments, the accuracy is at least 89%.

[1352] In some embodiments, provided herein is an ingestible device, comprising:

[1353] an immune modulator;

[1354] one or more processing devices; and

[1355] one more machine readable hardware storage devices storing instructions that are executable by the one or more processing devices to transmit data to a device capable of implementing the data to determine a location of the medical device in a portion of a GI tract of a subject to an accuracy of at least 85%. In some embodiments, the accuracy is at least 90%. In some embodiments, the accuracy is at least 95%. In some embodiments, the accuracy is at least 97%. In some embodiments, the accuracy is at least 98%. In some embodiments, the accuracy is at least 99%. In some embodiments, the accuracy is 100%. In some embodiments, the portion of the GI tract of the subject comprises the duodenum. In some embodiments, the portion of the GI tract of the subject comprises the jejunum. In some embodiments, the portion of the GI tract of the subject comprises the terminal ileum, cecum and colon. In some embodiments, the ingestible device further comprises first and second light sources, wherein the first light source is configured to emit light at a first wavelength, and the second light source is configured to emit light at a second wavelength different from the first wavelength. In some embodiments, the ingestible device further comprises first and second detectors, wherein the first detector is configured to detect light at the first wavelength, and the second detector is configured to detect light at the second wavelength. In some embodiments, the data comprise intensity data for at least two different wavelengths of light.

[1356] In some embodiments, provided herein is an ingestible device, comprising:

[1357] an immune modulator;

[1358] one or more processing devices; and

[1359] one more machine readable hardware storage devices storing instructions that are executable by the one or more processing devices to transmit data to an external device capable of implementing the data to determine that the ingestible device is in the cecum of subject to an accuracy of at least 70%. In some embodiments, the accuracy is at least 75%. In some embodiments, the accuracy is at least 80%. In some embodiments, the accuracy is at least 85%. In some embodiments, the accuracy is at least 88%. In some embodiments, the accuracy is at least 89%.

[1360] In some embodiments, provided herein is a method of treating an inflammatory disease or condition arising in a tissue that originates from the endoderm in a subject, comprising: releasing an immune modulator at a location in the gastrointestinal tract of the subject that is proximate to an intended site of release, wherein the method comprises administering orally to the subject an ingestible device as disclosed herein, the method further comprising determining a location of the ingestible medical device in a portion of a GI tract of the subject to an accuracy of at least 85%. In some embodiments, the accuracy is at least 90%. In some embodiments, the accuracy is at least 95%. In some embodiments, the accuracy is at least 97%. In some embodiments, the accuracy is at least 98%. In some embodiments, the accuracy is at least 99%. In some embodiments, the accuracy is 100%. In some embodiments, the portion of the GI tract of the subject comprises the duodenum. In some embodiments, the portion of the GI tract of the subject comprises the jejunum. In some embodiments, the portion of the GI tract of the subject comprises the terminal ileum, cecum and colon. In some embodiments, determining the location of the ingestible device within the GI tract of a subject comprises determining reflected light signals within the GI tract, wherein the reflected signals comprise light of at least two different wavelengths. In some embodiments, the reflected signals comprise light of at least three different wavelengths. In some embodiments, the reflected light comprise first and second wavelengths; the first wavelength is between 495-600 nm; and the second wavelength is between 400-495 nm. In some embodiments, the first and second wavelengths are separated by at least 50 nm.

[1361] In some embodiments, provided herein is a method of treating an inflammatory disease or condition arising in a tissue originating from the endoderm in a subject, comprising: releasing an immune modulator at a location in the gastrointestinal tract of the subject that is proximate to the intended site of release, wherein the method comprises administering orally to the subject an ingestible device as disclosed herein, the method further comprising determining a location of the ingestible medical device within the GI tract of the subject based on measured reflected light signals within the GI tract, where the reflected signals comprise light of at least two different wavelengths. In some embodiments, the reflected signals comprise light of at least three different wavelengths. In some embodiments, the at least two different wavelengths comprise first and second wavelengths; the first wavelength is between 495-600 nm; and the second wavelength is between 400-495 nm. In some embodiments, the first and second wavelengths are separated by at least 50 nm.

[1362] In some embodiments, provided herein is an ingestible device, comprising:

[1363] a housing;

[1364] a gas generating cell located within the housing; and

[1365] a storage reservoir located within the housing,

[1366] wherein the storage reservoir stores an immune modulator, and an opening in the housing is configured to allow the immune modulator to be released out of the housing from the storage reservoir via an opening in the ingestible device.

[1367] In some embodiments, the housing is defined by a first end, a second end substantially opposite from the first end, and a wall extending longitudinally from the first end to the second end;

[1368] wherein an electronic component is located within the housing and the gas generating cell is adjacent to the electronic component,

[1369] wherein the electronic component is configured to activate the gas generating cell to generate gas;

[1370] wherein a first end of the storage reservoir is connected to the first end of the housing;

[1371] wherein an exit valve is located at the first end of the housing and is configured to allow the immune modulator to be released out of the first end of the housing; and wherein the ingestible device further comprises a safety device placed within or attached to the housing,

[1372] wherein the safety device is configured to relieve an internal pressure within the housing when the internal pressure exceeds a threshold level.

[1373] In some embodiments, provided herein is an ingestible device, comprising:

[1374] a gas generating cell located within the housing;

[1375] a storage reservoir located within the housing,

[1376] wherein the storage reservoir stores an immune modulator; and

[1377] an injection device configured to inject the immune modulator out of the housing from the storage reservoir via an opening in the ingestible device.

[1378] In some embodiments, the housing is defined by a first end, a second end substantially opposite from the first end, and a wall extending longitudinally from the first end to the second end;

[1379] wherein an electronic component is located within the housing and the gas generating cell is adjacent to the electronic component,

[1380] wherein the electronic component is configured to activate the gas generating cell to generate gas;

[1381] wherein a first end of the storage reservoir is connected to the first end of the housing; wherein the injection device is located at the first end of the housing and is configured to inject the immune modulator out of the housing via an opening in the ingestible device; and and wherein the ingestible device further comprises a safety device placed within or attached to the housing,
[1382] wherein the safety device is configured to relieve an internal pressure within the housing.

[1383] In some embodiments, provided herein is an ingestible device, comprising:

[1384] a housing;

[1385] an optical sensing unit supported by a side of the housing,

[1386] wherein the optical sensing unit is configured to detect a reflectance from an environment external to the housing;

[1387] a gas generating cell located within the housing,

[1388] wherein the ingestible device is configured so that, in response to identifying a location of the ingestible device based on a reflectance detected by the optical sensing unit, the gas generating cell generates a gas;

[1389] a storage reservoir located within the housing,

[1390] wherein the storage reservoir stores an immune modulator;

[1391] and wherein the ingestible device is configured so that, when the gas generating cell generates the gas, the immune modulator is delivered out of the housing from the storage reservoir via an opening in the ingestible device.

[1392] In some embodiments, the housing is defined by a first end, a second end substantially opposite from the first end, and a wall extending longitudinally from the first end to the second end;

[1393] wherein the optical sensing unit is supported by the side of the housing,

[1394] wherein the ingestible device further comprises an electronic component located within the housing;

[1395] wherein the gas generating cell is adjacent to the electronic component,

[1396] wherein the electronic component is configured to activate the gas generating cell to generate gas;

[1397] wherein a first end of the storage reservoir is connected to the first end of the housing;

[1398] wherein the ingestible device further comprises a membrane in contact with the gas generating cell and configured to move or deform into the storage reservoir by a pressure generated by the gas generating cell; and

[1399] wherein the ingestible device further comprises a dispensing outlet placed at the first end of the housing and configured to deliver the immune modulator out of the housing.

[1400] In some embodiments of any ingestible device disclosed herein comprising an immune modulator, the immune modulator is present in a therapeutically effective amount.

[1401] In case of conflict between the present specification and any subject matter incorporated by reference herein, the present specification, including definitions, will control.

### Devices and Methods for Detection of Analytes in GI Tract

[1402] Detection of certain analytes in the GI tract may be useful in the identification of the nature and severity of the disease, in accurately locating the site(s) of disease, and in assessing patient response to a therapeutic agent. The appropriate therapeutic agent may accordingly be released at the correct locations(s), dosage, or timing for the disease. As discussed further herein, analytes may include biomarkers associated with a disease or associated with patient response and/or therapeutic agents previously administered to treat the disease. In some embodiments, the disclosure provides an ingestible device for detecting an analyte in a sample, the ingestible device comprising a sampling chamber that is configured to hold a composition comprising: (1) a plurality of donor particles, each of the plurality of donor particles comprising a photosensitizer and having coupled thereto a first antigen-binding agent that binds to the analyte, wherein the photosensitizer, in its excited state, is capable of generating singlet oxygen; and (2) a plurality of acceptor particles, each of the plurality of acceptor particles comprising a chemiluminescent compound and having coupled thereto a second antigen-binding agent that binds to the analyte, wherein the chemiluminescent compound is capable of reacting with singlet oxygen to emit luminescence. In some embodiments, the first and the second analyte-binding agents are antigen-binding agents (e.g., antibodies). In some embodiments, the first and the second antigen-binding agents bind to the same epitope of the analyte (e.g., a protein). In some embodiments, the first and the second antigen-binding agents bind to separate epitopes of the analyte (e.g., a protein) that spatially overlap. In some embodiments, the first and the second antigen-binding agents bind to the separate epitopes of the analyte (e.g., a protein) that do not spatially overlap.

[1403] In some embodiments, this disclosure provides an ingestible device for detecting an analyte in a sample, the ingestible device comprising a sampling chamber that is configured to hold an absorbable material (e.g., an absorbable pad or sponge) having absorbed therein a composition comprising: (1) a plurality of donor particles, each of the plurality of donor particles comprising a photosensitizer and having coupled thereto a first antigen-binding agent that binds to the analyte, wherein the photosensitizer, in its excited state, is capable of generating singlet oxygen; and (2) a plurality of acceptor particles, each of the plurality of acceptor particles comprising a chemiluminescent compound and having coupled thereto a second antigen-binding agent that binds to the analyte, wherein the chemiluminescent compound is capable of reacting with singlet oxygen to emit luminescence. In some embodiments, the first and the second analyte-binding agents are antigen-binding agents (e.g., antibodies). In some embodiments, the first and the second antigen-binding agents bind to the same epitope of the analyte (e.g., a protein). In some embodiments, the first and the second antigen-binding agents bind to separate epitopes of the analyte (e.g., a protein) that spatially overlap. In some embodiments, the first and the second antigen-binding agents bind to the separate epitopes of the analyte (e.g., a protein) that do not spatially overlap.

[1404] In certain embodiments, the disclosure provides a kit comprising an ingestible device as described herein. In some embodiments, the kit further comprises instructions, e.g., for detecting or quantifying an analyte in a sample.

[1405] In some embodiments, the disclosure provides methods for determining an analyte in a sample. In certain embodiments, this disclosure provides a method of detecting an analyte in a fluid sample of a subject, comprising: (1) providing an ingestible device; (2) transferring the fluid sample of the subject into the sampling chamber of the ingestible device in vivo; (3) irradiating the composition held in the sampling chamber of the ingestible device with light to excite the photosensitizer; and (4) measuring total luminescence or rate of change of luminescence emitted from the composition held in the sampling chamber of the ingestible device as a function of time, thereby determining the level of the analyte in the fluid sample. In some embodiments, the method further comprises comparing the level of the analyte in the fluid sample with the level of analyte in a reference sample (e.g., a reference sample obtained from a healthy subject). In some embodiments, the level of the analyte in the sample is used to diagnose and/or monitor a disease or disorder in the subject.

[1406] In some embodiments, the disclosure provides a method of detecting an analyte in a fluid sample of a subject, comprising: (1) providing an ingestible device, the device comprising a sampling chamber that is configured to hold an absorbable material (e.g., an absorbable pad or sponge) having absorbed therein a composition, as described herein; (2) transferring the fluid sample of the subject into the sampling chamber of the ingestible device in vivo; (3) fully or partially saturating the absorbable material held in the sampling chamber of the ingestible device with the fluid sample; (4) irradiating the absorbable material held in the sampling chamber of the ingestible device with light to excite the photosensitizer; and (5) measuring total luminescence or rate of change of luminescence emitted from the composition held in the sampling chamber of the ingestible device as a function of time, thereby determining the level of the analyte in the fluid sample. In some embodiments, the method further comprises comparing the level of the analyte in the fluid sample with the level of analyte in a reference sample (e.g., a reference sample obtained from a healthy subject). In some embodiments, the level of the analyte in the sample is used to diagnose and/or monitor a disease or disorder in the subject.

[1407] In some embodiments, the disclosure provides a method of assessing or monitoring the need to treat a subject suffering from or at risk of overgrowth of bacterial cells in the gastrointestinal (GI) tract, comprising: (1) providing an ingestible device for detecting an analyte; (2) transferring a fluid sample from the GI tract of the subject into the sampling chamber of the ingestible device in vivo; (3) irradiating the composition held in the sampling chamber of the ingestible device with light to excite the photosensitizer; (4) measuring total luminescence or rate of change of luminescence emitted from the composition held in the sampling chamber of the ingestible device as a function of time; (5) correlating the total luminescence or the rate of change of luminescence as a function of time measured in step (4) to the amount of the analyte in the fluid sample; and (6) correlating the amount of the analyte in the fluid sample to the number of viable bacterial cells in the fluid sample. In some embodiments, a number of viable bacterial cells determined in step (6) greater than a control number of viable bacterial cells, indicates a need for treatment (e.g., with an antibiotic agent described herein). In some embodiments, the control number of viable bacterial cells is 10³, 10⁴, 10⁵, 10⁶, 10⁷, 10⁸, 10⁹, or more. For example, in some embodiments, a number of viable bacterial cells determined in step (6) greater that about 10³ CFU/mL indicates a need for treatment. In some embodiments, a number of viable bacterial cells determined in step (6) greater that about 10⁴ CFU/mL indicates a need for treatment. In some embodiments, a number of the viable bacterial cells determined in step (6) greater than about 105 CFU/mL indicates a need for treatment, e.g., with an antibiotic agent as described herein. In some embodiments, a number of viable bacterial cells determined in step (6) greater that about 10⁶ or more CFU/mL indicates a need for treatment.

[1408] In some embodiments, the total luminescence or the rate of change of luminescence as a function of time of the sponge is measured over multiple time points for an extended period of time in step (4). For instance, in some embodiments, the total luminescence or rate of change of luminescence as a function of time of the sample is measured continuously for a period of 0-1800 minutes, 0-1600 minutes, 0-1500 minutes, 0-1440 minutes, 0-1320 minutes, 0-1000 minutes, 0-900 minutes, 0-800 minutes, 0-700 minutes, 0-600 minutes, 0-500 minutes, 0-400 minutes, 0-350 minutes, 0-330 minutes, 0-300 minutes, 0-270 minutes, or 0-220 minutes. In some embodiments, the total luminescence or the rate of change of luminescence as a function of time of said sample is measured continuously for a period of 0-330 minutes. In some embodiments, the method is performed in vivo. In some embodiments, the method includes communicating the results of the onboard assay(s) to an ex vivo receiver. In some embodiments, the total luminescence or the rate of change of luminescence as a function of time of the sponge is measured over multiple time points for an extended period of time in step (5). For instance, in some embodiments, the total luminescence or rate of change of luminescence as a function of time of the sample is measured continuously for a period of 0-1800 minutes, 0-1600 minutes, 0-1500 minutes, 0-1440 minutes, 0-1320 minutes, 0-1000 minutes, 0-900 minutes, 0-800 minutes, 0-700 minutes, 0-600 minutes, 0-500 minutes, 0-400 minutes, 0-350 minutes, 0-330 minutes, 0-300 minutes, 0-270 minutes, or 0-220 minutes. In some embodiments, the total luminescence or the rate of change of luminescence as a function of time of said sample is measured continuously for a period of 0-330 minutes. In some embodiments, the method is performed in vivo. In some embodiments, the method includes communicating the results of the onboard assay(s) to an ex vivo receiver.

[1409] In some embodiments, the disclosure provides a method of assessing or monitoring the need to treat a subject suffering from or at risk of overgrowth of bacterial cells in the gastrointestinal tract, comprising: (1) providing an ingestible device for detecting an analyte, the device comprising a sampling chamber that is configured to hold an absorbable material (e.g., an absorbable pad or sponge) having absorbed therein a composition, as described herein; (2) transferring a fluid sample from the GI tract of the subject into the sampling chamber of the ingestible device in vivo; (3) fully or partially saturating the absorbable material held in the sampling chamber of the ingestible device with the fluid sample; (4) irradiating the absorbable material held in the sampling chamber of the ingestible device with light to excite the photosensitizer; (5) measuring total luminescence or rate of change of luminescence emitted from the composition held in the sampling chamber of the ingestible device as a function of time; (6) correlating the total luminescence or the rate of change of luminescence as a function of time measured in step (5) to the amount of the analyte in the fluid sample; and (7) correlating the amount of the analyte in the fluid sample to the number of viable bacterial cells in the fluid sample. In some embodiments, a number of viable bacterial cells determined in step (7) greater than a control number of viable bacterial cells indicates a need for treatment (e.g., with an antibiotic agent described herein). In some embodiments, the control number of viable bacterial cells is 10³, 10⁴, 10⁵, 10⁶, 10⁷, 10⁸, 10⁹, or more. For example, in some embodiments, a number of viable bacterial cells determined in step (7) greater that about 10³ CFU/mL indicates a need for treatment. In some embodiments, a number of viable bacterial cells determined in step (7) greater that about 10⁴ CFU/mL indicates a need for treatment. In some embodiments, a number of the viable bacterial cells determined in step (7) greater than about 10⁵ CFU/mL indicates a need for treatment, e.g., with an antibiotic agent as described herein. In some embodiments, a number of viable bacterial cells determined in step (7) greater that about 10⁶ or more CFU/mL indicates a need for treatment.

[1410] In some embodiments, the disclosure, provides a method of measuring the presence, absence or amount of one or more analytes from one or more samples in the gastrointestinal tract. In some embodiments the one or more analytes are measured multiple times, for example, at different time points or at different locations. In one embodiment, a single device measures one or more analytes or more time points or locations; thereby creating a “molecular map” of a physiological region. Measurements can be taken at any location in the gastrointestinal tract. For example, in one aspect, analytes from samples from one or more of the duodenum, jejunum, ileum, ascending colon, transverse colon or descending colon can be measured to create a molecular map of the small and large intestine. In one aspect, the sample is from the duodenum. In one aspect, In one aspect, the sample is from the jejunum. In one aspect, the sample is from the ileum. In one aspect, the sample is from the ascending colon. In one aspect, the sample is from the transverse colon. In one aspect, the sample is from the descending colon.

[1411] In another aspect, a series of measurements can be taken over a shorter distance of the gastrointestinal tract (e.g., the ileum) to create a higher resolution molecular map. In some embodiments, previous endoscopic imaging may identify a diseased area for molecular mapping. For example, a gastroenterologist may use imaging (e.g., an endoscope equipped with a camera) to identify the presence of Crohn's Disease in the ileum and cecum of a patient, and the methods and techniques herein may be used to measure inflammation-associated analytes in this diseased area of the patient. In a related embodiment, the inflammation-associated analytes, or any analyte, may be measured every one or more days to monitor disease flare-ups, or response to therapeutics.

### Analytes

[1412] The compositions and methods described herein can be used to detect, analyze, and/or quantitate a variety of analytes in a human subject. “Analyte” as used herein refers to a compound or composition to be detected in a sample. Exemplary analytes suitable for use herein include those described in U.S. Pat. No. 6,251,581, which is incorporated by reference herein in its entirety. Broadly speaking, an analyte can be any substance (e.g., a substance with one or more antigens) capable of being detected. An exemplary and non-limiting list of analytes includes ligands, proteins, blood clotting factors, hormones, cytokines, polysaccharides, mucopolysaccharides, microorganisms (e.g., bacteria), microbial antigens, and therapeutic agents (including fragments and metabolites thereof).

[1413] For instance, the analyte may be a ligand, which is monovalent (monoepitopic) or polyvalent (polyepitopic), usually antigenic or haptenic, and is a single compound or plurality of compounds which share at least one common epitopic or determinant site. The analyte can be a part of a cell such as bacteria or a cell bearing a blood group antigen such as A, B, D, etc., a human leukocyte antigen (HLA), or other cell surface antigen, or a microorganism, e.g., bacterium (e.g. a pathogenic bacterium), a fungus, protozoan, or a virus (e.g., a protein, a nucleic acid, a lipid, or a hormone). In some embodiments, the analyte can be a part of an exosome (e.g., a bacterial exosome). In some embodiments, the analyte is derived from a subject (e.g., a human subject). In some embodiments, the analyte is derived from a microorganism present in the subject. In some embodiments, the analyte is a nucleic acid (e.g., a DNA molecule or a RNA molecule), a protein (e.g., a soluble protein, a cell surface protein), or a fragment thereof, that can be detected using any of the devices and methods provided herein.

[1414] The polyvalent ligand analytes will normally be poly(amino acids), i.e., a polypeptide (i.e., protein) or a peptide, polysaccharides, nucleic acids (e.g., DNA or RNA), and combinations thereof. Such combinations include components of bacteria, viruses, chromosomes, genes, mitochondria, nuclei, cell membranes, and the like.

[1415] In some embodiments, the polyepitopic ligand analytes have a molecular weight of at least about 5,000 Da, more usually at least about 10,000 Da. In the poly(amino acid) category, the poly(amino acids) of interest may generally have a molecular weight from about 5,000 Da to about 5,000,000 Da, more usually from about 20,000 Da to 1,000,000 Da; among the hormones of interest, the molecular weights will usually range from about 5,000 Da to 60,000 Da.

[1416] In some embodiments, the monoepitopic ligand analytes generally have a molecular weight of from about 100 to 2,000 Da, more usually from 125 to 1,000 Da.

[1417] A wide variety of proteins may be considered as to the family of proteins having similar structural features, proteins having particular biological functions, proteins related to specific microorganisms, particularly disease causing microorganisms, etc. Such proteins include, for example, immunoglobulins, cytokines, enzymes, hormones, cancer antigens, nutritional markers, tissue specific antigens, etc.

[1418] In some embodiments, the analyte is a protein. In some embodiments, the analyte is a protein, e.g., an enzyme (e.g., a hemolysin, a protease, a phospholipase), a soluble protein, an exotoxin. In some embodiments, the analyte is a fragment of a protein, a peptide, or an antigen. In some embodiments, the analyte is a peptide of at least 5 amino acids (e.g., at least 6, at least 7, at least 8, at least 9, at least 10, at least 25, at least, 50, or at least 100 amino acids). Exemplary lengths include 6, 7, 8, 9, 10, 11, 12, 13, 14, 15, 16, 17, 18, 19, 20, 21, 22, 23, 24, 25, 26, 27, 28, 29, 30, 50, 75, or 100 amino acids. Exemplary classes of protein analytes include, but are not limited to: protamines, histones, albumins, globulins, scleroproteins, phosphoproteins, mucoproteins, chromoproteins, lipoproteins, nucleoproteins, glycoproteins, T-cell receptors, proteoglycans, cell surface receptors, membrane-anchored proteins, transmembrane proteins, secreted proteins, HLA, and unclassified proteins.

[1419] In some embodiments, the analyte is an affimer (see, e.g., Tiede et al. (2017) eLife 6: e24903, which is expressly incorporated herein by reference).

[1420] Exemplary analytes include: Prealbumin, Albumin, α₁-Lipoprotein, α₁-Antitrypsin, α₁-Glycoprotein, Transcortin, 4.6S-Postalbumin, α₁-glycoprotein, α_{1X}-Glycoprotein, Thyroxin-binding globulin, Inter-α-trypsin-inhibitor, Gc-globulin (Gc 1-1, Gc 2-1, Gc 2-2), Haptoglobin (Hp 1-1, Hp 2-1, Hp 2-2), Ceruloplasmin, Cholinesterase, α₂-Lipoprotein(s), Myoglobin, C-Reactive Protein, α₂-Macroglobulin, α₂-HS-glycoprotein, Zn-α₂-glycoprotein, α₂-Neuramino-glycoprotein, Erythropoietin, β-lipoprotein, Transferrin, Hemopexin, Fibrinogen, Plasminogen, β₂-glycoprotein I, β₂-glycoprotein II, Immunoglobulin G (IgG) or γG-globulin, Immunoglobulin A (IgA) or γA-globulin, Immunoglobulin M (IgM) or γM-globulin, Immunoglobulin D (IgD) or γD-Globulin (γD), Immunoglobulin E (IgE) or γE-Globulin (γE), Free K and X light chains, and Complement factors: C′1, (C′1q, C′1r, C′1s, C′2, C′3 (β₁A, α₂D), C′4, C′5, C′6, C′7, C′8, C′9.

[1421] Additional examples of analytes include tumor necrosis factor-α (TNFα), interleukin-12 (IL-12), IL-23, IL-6, α2β1 integrin, α4β1 integrin, α4β7 integrin, integrin α4β1 (VLA-4), E-selectin, ICAM-1, α5β1 integrin, α4β1 integrin, VLA-4, α2β1 integrin, α5β3 integrin, α5β5 integrin, αIIbβ3 integrin, MAdCAM-1, SMAD7, JAK1, JAK2, JAK3, TYK-2, CHST15, IL-1, IL-1α, IL-1μ, IL-18, IL-36α, IL-36μ, IL-36γ, IL-38, IL-33, IL-13, CD40L, CD40, CD3γ, CD3δ, CD3ε, CD3ζ, TCR, TCRα, TCRβ, TCRδ, TCRγ, CD14, CD20, CD25, IL-2, IL-2 β chain, IL-2 γ chain, CD28, CD80, CD86, CD49, MMP1, CD89, IgA, CXCL10, CCL11, an ELR chemokine, CCR2, CCR9, CXCR3, CCR3, CCR5, CCL2, CCL8, CCL16, CCL25, CXCR1m CXCR2m CXCL1, CXCL2, CXCL3, CXCL4, CXCL5, CXCL6, CXCL7, and CXCL8, and a nucleic acid (e.g., mRNA) encoding any of the same.

[1422] In some embodiments, the analyte is a blood clotting factor. Exemplary blood clotting factors include, but are not limited to:

| International designation | Name |
|---|---|
| I | Fibrinogen |
| II | Prothrombin |
| IIa | Thrombin |
| III | Tissue thromboplastin |
| V and VI | Proaccelerin, accelerator |
| | globulin |
| VII | Proconvertin |
| VIII | Antihemophilic globulin |
| | (AHG) |
| IX | Christmas factor |
| | plasma thromboplastin |
| | component (PTC) |
| X | Stuart-Prower factor, |
| | autoprothrombin III |
| XI | Plasma thromboplastin |
| | antecedent (PTA) |
| XII | Hagemann factor |
| XIII | Fibrin-stabilizing factor |

[1423] In some embodiments, the analyte is a hormone. Exemplary hormones include, but are not limited to: Peptide and Protein Hormones, Parathyroid hormone, (parathromone), Thyrocalcitonin, Insulin, Glucagon, Relaxin, Erythropoietin, Melanotropin (melancyte-stimulating hormone; intermedin), Somatotropin (growth hormone), Corticotropin (adrenocorticotropic hormone), Thyrotropin, Follicle-stimulating hormone, Luteinizing hormone (interstitial cell-stimulating hormone), Luteomammotropic hormone (luteotropin, prolactin), Gonadotropin (chorionic gonadotropin), Secretin, Gastrin, Angiotensin I and II, Bradykinin, and Human placental lactogen, thyroxine, cortisol, triiodothyronine, testosterone, estradiol, estrone, progestrone, luteinizing hormone-releasing hormone (LHRH), and immunosuppressants such as cyclosporin, FK506, mycophenolic acid, and so forth.

[1424] In some embodiments, the analyte is a peptide hormone (e.g., a peptide hormone from the neurohypophysis). Exemplary peptide hormones from the neurohypophysis include, but are not limited to: Oxytocin, Vasopressin, and releasing factors (RF) (e.g., corticotropin releasing factor (CRF), luteinizing hormone releasing factor (LRF), thyrotropin releasing factor (TRY), Somatotropin-RF, growth hormone releasing factor (GRF), follicle stimulating hormone-releasing factor (FSH-RF), prolactin inhibiting factor (PIF), and melanocyte stimulating hormone inhibiting factor (MIF)).

[1425] In some embodiments, the analyte is a cytokine or a chemokine. Exemplary cytokines include, but are not limited to: interleukin-1 (IL-1), interleukin-2 (IL-2), interleukin-6 (IL-6), epidermal growth factor (EGF), tumor necrosis factor (TNF, e.g., TNF-α or TNF-β), and nerve growth factor (NGF).

[1426] In some embodiments, the analyte is a cancer antigen. Exemplary cancer antigens include, but are not limited to: prostate-specific antigen (PSA), carcinoembryonic antigen (CEA), α-fetoprotein, Acid phosphatase, CA19.9, and CA125.

[1427] In some embodiments, the analyte is a tissue-specific antigen. Exemplary tissue specific antigens include, but are not limited to: alkaline phosphatase, myoglobin, CPK-MB, calcitonin, and myelin basic protein.

[1428] In some embodiments, the analyte is a mucopolysaccharide or a polysaccharide.

[1429] In some embodiments, the analyte is a microorganism, or a molecule derived from or produced by a microorganism (e.g., a bacteria, a virus, prion, or a protozoan). For example, in some embodiments, the analyte is a molecule (e.g., an protein or a nucleic acid) that is specific for a particular microbial genus, species, or strain (e.g., a specific bacterial genus, species, or strain). In some embodiments, the microorganism is pathogenic (i.e., causes disease). In some embodiments, the microorganism is non-pathogenic (e.g., a commensal microorganism). Exemplary microorganisms include, but are not limited to:

| | |
|---|---|
| Corynebacteria | |
| Corynebacterium diphtheria | |
| Pneumococci | |
| Diplococcus pneumoniae | |
| Streptococci | |
| Streptococcus pyrogenes | |
| Streptococcus salivarus | |
| Staphylococci | |
| Staphylococcus aureus | |
| Staphylococcus albus | |
| Neisseria | |
| Neisseria meningitidis | |
| Neisseria gonorrhea | |
| Enterobacteriaciae | |
| Escherichia coli | |
| Aerobacter aerogenes | The coliform |
| Klebsiella pneumoniae | bacteria |
| Salmonella typhosa | |
| Salmonella choleraesuis | The Salmonellae |
| Salmonella typhimurium | |
| Shigella dysenteria | |
| Shigella schmitzii | |
| Shigella arabinotarda | |
| | The Shigellae |
| Shigella flexneri | |
| Shigella boydii | |
| Shigella sonnei | |
| Other enteric bacilli | |
| Proteus vulgaris | |
| Proteus mirabilis | Proteus species |
| Proteus morgani | |
| Pseudomonas aeruginosa | |
| Alcaligenes faecalis | |
| Vibrio cholerae | |
| Hemophilus-Bordetella group | Rhizopus oryzae |
| Hemophilus influenza, H. ducryi | Rhizopus arrhizua |
| | Phycomycetes |
| Hemophilus hemophilus | Rhizopus nigricans |
| Hemophilus aegypticus | Sporotrichum schenkii |
| Hemophilus parainfluenza | Flonsecaea pedrosoi |
| Bordetella pertussis | Fonsecacea compact |
| Pasteurellae | Fonsecacea dermatidis |
| Pasteurella pestis | Cladosporium carrionii |
| Pasteurella tulareusis | Phialophora verrucosa |
| Brucellae | Aspergillus nidulans |
| Brucella melltensis | Madurella mycetomi |
| Brucella abortus | Madurella grisea |
| Brucella suis | Allescheria boydii |
| Aerobic Spore-forming Bacilli | Phialophora jeanselmei |
| Bacillus anthracis | Microsporum gypseum |
| Bacillus subtilis | Trichophyton mentagrophytes |
| Bacillus megaterium | Keratinomyces ajelloi |
| Bacillus cereus | Microsporum canis |
| Anaerobic Spore-forming Bacilli | Trichophyton rubrum |
| Clostridium botulinum | Microsporum adouini |
| Clostridium tetani | Viruses |
| Clostridium perfringens | Adenoviruses |
| Clostridium novyi | Herpes Viruses |
| Clostridium septicum | Herpes simplex |
| Clostridium histoyticum | Varicella (Chicken pox) |
| Clostridium tertium | Herpes Zoster (Shingles) |
| Clostridium bifermentans | Virus B |
| Clostridium sporogenes | Cytomegalovirus |
| Mycobacteria | Pox Viruses |
| Mycobacterium tuberculosis hominis | Variola (smallpox) |
| Mycobacterium bovis | Vaccinia |
| Mycobacterium avium | Poxvirus bovis |
| Mycobacterium leprae | Paravaccinia |
| Mycobacterium paratuberculosis | Molluscum contagiosum |
| Actinomycetes (fungus-ike bacteria) | Picornaviruses |
| Actinomyces Isaeli | Poliovirus |
| Actinomyces bovis | Coxsackievirus |
| Actinomyces naeslundii | Echoviruses |
| Nocardia asteroides | Rhinoviruses |
| Nocardia brasiliensis | Myxoviruses |
| The Spirochetes | Influenza(A, B, and C) |
| Treponema pallidum | Parainfluenza (1-4) |
| Treponema pertenue | Mumps Virus |
| Spirillum minus | |
| Streptobacillus monoiliformis | Newcastle Disease Virus |
| Treponema carateum | Measles Virus |
| Borrelia recurrentis | Rinderpest Virus |
| Leptospira icterohemorrhagiae | Canine Distemper Virus |
| Leptospira canicola | Respiratory Syncytial Virus |
| Trypanasomes | Rubella Virus |
| Mycoplasmas | Arboviruses |
| Mycoplasma pneumoniae | |
| Other pathogens | Eastern Equine Encephalitis |
| | Virus |
| Listeria monocytogenes | Western Equine Encephalitis |
| | Virus |
| Erysipeothrix rhusiopathiae | Sindbis Virus |
| Streptobacillus moniliformis | Chikugunya Virus |
| Donvania granulomatis | Semliki Forest Virus |
| Entamoeba histolytica | Mayora Virus |
| Plasmodium falciparum | St. Louis Encephalitis |
| Plasmodium japonicum | California Encephalitis Virus |
| Bartonella bacilliformis | Colorado Tick Fever Virus |
| Rickettsia (bacteria-like parasites) | Yellow Fever Virus |
| Rickettsia prowazekii | Dengue Virus |
| Rickettsia mooseri | Reoviruses |
| Rickettsia rickettsii | Reovirus Types 1-3 |
| Rickettsia conori | Retroviruses |
| Rickettsia australis | Human Immunodeficiency |
| Rickettsia sibiricus | Viruses I and II (HTLV) |
| Rickettsia akari | Human T-cell Lymphotrophic |
| Rickettsia tsutsugamushi | Virus I & II (HIV) |
| Rickettsia burnetti | Hepatitis |
| Rickettsia quintana | Hepatitis A Virus |
| Chlamydia (unclassifiable parasites | Hepatitis B Virus |
| bacterial/viral) | Hepatitis C Virus |
| Chlamydia agents (naming uncertain) | Tumor Viruses |
| Chlamydia trachomatis | |
| Fungi | Rauscher Leukemia Virus |
| Cryptococcus neoformans | Gross Virus |
| Blastomyces dermatidis | Maloney Leukemia Virus |
| Histoplasma capsulatum | |
| Coccidioides immitis | Human Papilloma Virus |
| Paracoccidioides brasliensis | |
| Candida albicans | |
| Aspergillus fumigatus | |
| Mucor corymbifer (Absidia corymbifera) | |

[1430] In some embodiments, the analyte is a bacterium. Exemplary bacteria include, but are not limited to: Escherichia coli (or E. coli), Bacillus anthracis, Bacillus cereus, Clostridium botulinum, Clostridium difficile, Yersinia pestis, Yersinia enterocolitica, Francisella tularensis, Brucella species, Clostridium perfringens, Burkholderia mallei, Burkholderia pseudomallei, Staphylococcus species, Mycobacterium species, Group A Streptococcus, Group B Streptococcus, Streptococcus pneumoniae, Helicobacter pylori, Salmonella enteritidis, Mycoplasma hominis, Mycoplasma orale, Mycoplasma salivarium, Mycoplasma fermentans, Mycoplasma pneumoniae, Mycobacterium bovis, Mycobacterium tuberculosis, Mycobacterium avium, Mycobacterium leprae, Rickettsia rickettsii, Rickettsia akari, Rickettsia prowazekii, Rickettsia canada, Bacillus subtilis, Bacillus subtilis niger, Bacillus thuringiensis, Coxiella burnetti, Faecalibacterium prausnitzii (also known as Bacteroides praussnitzii), Roseburia hominis, Eubacterium rectale, Dialister invisus, Ruminococcus albus, Ruminococcus callidus, and Ruminococcus bromii. Additional exemplary bacteria include bacteria of the phyla Firmicutes (e.g., Clostridium clusters XIVa and IV), bacteria of the phyla Bacteroidetes (e.g., Bacteroides fragilis or Bacteroides vulgatus), and bacteria of the phyla Actinobacteria (e.g., Coriobacteriaceae spp. or Bifidobacterium adolescentis). Bacteria of the Clostridium cluster XIVa includes species belonging to, for example, the Clostridium, Ruminococcus, Lachnospira, Roseburia, Eubacterium, Coprococcus, Dorea, and Butyrivibrio genera. Bacteria of the Clostridium cluster IV includes species belonging to, for example, the Clostridium, Ruminococcus, Eubacterium and Anaerofilum genera. In some embodiments, the analyte is Candida, e.g., Candida albicans. In some embodiments, the analyte is a byproduct from a bacterium or other microorganism, e.g., helminth ova, enterotoxin (Clostridium difficile toxin A; TcdA) or cytotoxin (Clostridium difficile toxin B; TcdB).

[1431] In some embodiments, the bacterium is a pathogenic bacterium. Non-limiting examples of pathogenic bacteria belong to the genera Bacillus, Bordetella, Borrelia, Brucella, Campylobacter, Chlamydia, Chlamydophila, Clostridium, Corynebacterium, Enterobacter, Enterococcus, Escherichia, Francisella, Haemophilus, Helicobacter, Legionella, Leptospira, Listeria, Mycobacterium, Mycoplasma, Neisseria, Pseudomonas, Rickettsia, Salmonella, Shigella, Staphylococcus, Streptococcus, Treponema, Vibrio, and Yersinia. Non-limiting examples of specific pathogenic bacterial species include a strain of Bacillus anthracis, a strain of a strain of Bordetella pertussis, a strain of a strain of Borrelia burgdorferi, a strain of a strain of Brucella abortus, a strain of a strain of Brucella canis, a strain of a strain of Brucella melitensis, a strain of a strain of Brucella suis, a strain of a strain of Campylobacter jejuni, a strain of Chlamydia pneumoniae, a strain of Chlamydia trachomatis, a strain of Chlamydophila psittaci, a strain of Clostridium botulinum, a strain of Clostridium difficile, a strain of Clostridium perfringens, a strain of Clostridium tetani, a strain of Corynebacterium diphtheria, a strain of Enterobacter sakazakii, a strain of Enterococcus faecalis, a strain of Enterococcus faecium, a strain of Escherichia coli (e.g., E. coli O157 H7), a strain of Francisella tularensis, a strain of Haemophilus influenza, a strain of Helicobacter pylori, a strain of Legionella pneumophila, a strain of Leptospira interrogans, a strain of Listeria monocytogenes, a strain of Mycobacterium leprae, a strain of Mycobacterium tuberculosis, a strain of Mycobacterium ulcerans, a strain of Mycoplasma pneumonia, a strain of Neisseria gonorrhoeae, a strain of Neisseria meningitides, a strain of Pseudomonas aeruginosa, a strain of Rickettsia rickettsia, a strain of Salmonella typhi and Salmonella typhimurium, a strain of Shigella sonnei, a strain of Staphylococcus aureus, a strain of Staphylococcus epidermidis, a strain of Staphylococcus saprophyticus, a strain of Streptococcus agalactiae, a strain of Streptococcus pneumonia, a strain of Streptococcus pyogenes, a strain of Treponema pallidum, a strain of Vibrio cholera, a strain of Yersinia enterocolitica, and, a strain of Yersinia pestis.

[1432] In some embodiments, the bacterium is a commensal bacterium (e.g., a probiotic). In some embodiments, the bacterium has been previously administered to a subject, e.g., as a live biotherapeutic agent. Exemplary commensal bacteria include, but are not limited to, Faecalibacterium prausnitzii (also referred to as Bacteroides praussnitzii), Roseburia hominis, Eubacterium rectale, Dialister invisus, Ruminococcus albus, Ruminococcus gnavus, Ruminococcus torques, Ruminococcus callidus, and Ruminococcus bromii.

[1433] In some embodiments, the analyte is a virus. In some embodiments, the virus is a pathogenic virus. Non-limiting examples of pathogenic viruses belong to the families Adenoviridae, Picornaviridae, Herpesviridae, Hepadnaviridae, Flaviviridae, Retroviridae, Orthomyxoviridae, Paramyxoviridae, Papovaviridae, Polyomavirus, Rhabdoviridae, and Togaviridae.

[1434] In some embodiments, the analyte is a fungus. In some embodiments, the fungi is a pathogenic fungus. Non-limiting examples of pathogenic fungi belong to the genera Asperfillus, Canidia, Cryptococcus, Histoplasma, Pneumocystis, and Stachybotrys. Non-limiting examples of specific pathogenic fungi species include a strain of Aspergillus clavatus, Aspergillus fumigatus, Aspergillus flavus, Canidia albicans, Cryptococcus albidus, Cryptococcus gattii, Cryptococcus laurentii, Cryptococcus neoformans, Histoplasma capsulatum, Pneumocystis jirovecii, Pneumocystis carinii, and Stachybotrys chartarum.

[1435] In some embodiments, the analyte is a protozoan. In some embodiments, the analyte is a pathogenic protozoan. Non-limiting examples of pathogenic protozoa belong to the genera Acanthamoeba, Balamuthia, Cryptosporidium, Dientamoeba, Endolimax, Entamoeba, Giardia, Iodamoeba, Leishmania, Naegleria, Plasmodium, Sappinia, Toxoplasma, Trichomonas, and Trypanosoma. Non-limiting examples of specific pathogenic protozoa species include a strain of Acanthamoeba spp., Balamuthia mandrillaris, Cryptosporidium canis, Cryptosporidium felis, Cryptosporidium hominis, Cryptosporidium meleagridis, Cryptosporidium muris, Cryptosporidium parvum, Dientamoeba fragilis, Endolimax nana, Entamoeba dispar, Entamoeba hartmanni, Entamoeba histolytica, Entamoeba coi, Entamoeba moshkovskii, Giardia lamblia, Iodamoeba butschlii, Leishmania aethiopica, Leishmania braziliensis, Leishmania chagasi, Leishmania donovani, Leishmania infantum, Leishmania major, Leishmania mexicana, Leishmania tropica, Naegleria fowleri, Plasmodium falciparum, Plasmodium knowlesi, Plasmodium malariae, Plasmodium ovale, Plasmodium vivax, Sappinia diploidea, Toxoplasma gondii, Trichomonas vaginalis, Trypanosoma brucei, and Trypanosoma cruzi.

[1436] In some embodiments, the analyte is secreted by or expressed on the cell surface of a microorganism (e.g., a bacterium, a colonic bacterium, a viable bacterium, a dead bacterium, a parasite (e.g., Giardia lamblia, Cryptosporidium, Cystoisosporiasis belli, and Balantidium coli), a virus (e.g., a herpes virus, a cytomegalovirus, a herpes simplex virus, an Epstein-Barr virus, a human papilloma virus, a rotavirus, a human herpesvirus-8; Goodgame (1999) Curr. Gastroenterol. Rep. 1(4): 292-300). In some embodiments, the analyte is secreted by or expressed on the cell surface of a Gram-negative bacterium (e.g., E. coli, Helicobacter pylori). In some embodiments, the analyte is secreted by or expressed on the cell surface (e.g., a bacterial surface epitope) of a Gram-positive bacterium (e.g., Staphylococcus aureus, Clostridium botulinum, Clostridium difficile).

[1437] In some embodiments, the analyte is a molecule expressed on the surface of a bacterial cell (e.g., a bacterial cell surface protein). In some embodiments, the analyte is a bacterial toxin (e.g., TcdA and/or TcdB from Clostridium difficile). In some embodiments, the analyte is CFA/I fimbriae, flagella, lipopolysaccharide (LPS), lipoteichoic acid, or a peptidoglycan. Non-limiting examples of bacterium that may express an analyte that can be detected using any of the devices and methods described herein include: Bacillus anthracis, Bacillus cereus, Clostridium botulinum, Clostridium difficile, Escherichia coli, Yersinia pestis, Yersinia enterocolitica, Francisella tularensis, Brucella species, Clostridium perfringens, Burkholderia mallei, Burkholderia pseudomallei, Helicobacter pylori, Staphylococcus species, Mycobacterium species, Group A Streptococcus, Group B Streptococcus, Streptococcus pneumoniae, Francisella tularensis, Salmonella enteritidis, Mycoplasma hominis, Mycoplasma orale, Mycoplasma salivarium, Mycoplasma fermentans, Mycoplasma pneumoniae, Mycobacterium bovis, Mycobacterium tuberculosis, Mycobacterium avium, Mycobacterium leprae, Rickettsia rickettsii, Rickettsia akari, Rickettsia prowazekii, Rickettsia canada, Bacillus subtilis, Bacillus subtilis niger, Bacillus thuringiensis, Coxiella bumetti, Candida albicans, Bacteroides fragilis, Leptospira interrogans, Listeria monocytogenes, Pasteurella multocida, Salmonella typhi, Salmonella typhimurium, Shigella dysenteriae, Shigella flexneria, Shigella sonnei, Vibrio cholera, and Vibrio parahaemolyticus.

[1438] In some embodiments, the analyte is a byproduct from a bacterium or another microorganism, e.g., helminth ova, enterotoxin (Clostridium difficile toxin A; TcdA), cytotoxin (Clostridium difficile toxin B; TcdB), ammonia. In some embodiments, the analyte is an antigen from a microorganism (e.g., a bacteria, virus, prion, fungus, protozoan or a parasite).

[1439] In some embodiments, the analytes include drugs, metabolites, pesticides, pollutants, and the like. Included among drugs of interest are the alkaloids. Among the alkaloids are morphine alkaloids, which includes morphine, codeine, heroin, dextromethorphan, their derivatives and metabolites; cocaine alkaloids, which include cocaine and benzyl ecgonine, their derivatives and metabolites; ergot alkaloids, which include the diethylamide of lysergic acid; steroid alkaloids; iminazoyl alkaloids; quinazoline alkaloids; isoquinoline alkaloids; quinoline alkaloids, which include quinine and quinidine; diterpene alkaloids, their derivatives and metabolites.

[1440] In some embodiments, the analyte is a steroid selected from the estrogens, androgens, andreocortical steroids, bile acids, cardiotonic glycosides and aglycones, which includes digoxin and digoxigenin, saponins and sapogenins, their derivatives and metabolites. Also included are the steroid mimetic substances, such as diethylstilbestrol.

[1441] In some embodiments, the analyte is a bile acid. In some embodiments, the presence, absence, and/or a specific level of one or more bile acids in the GI tract of a subject is indicative of a condition or disease state (e.g., a GI disorder and/or a non-GI disorder (e.g., a systemic disorder). For example, in some embodiments, the compositions and methods described herein may be used to detect and/or quantify a bile acid in the GI tract of the subject to diagnose a condition such as bile acid malabsorption (also known as bile acid diarrhea). In some embodiments, the analyte is a metabolite in the serotonin, tryptophan and/or kynurenine pathways, including but not limited to, serotonin (5-HT), 5-hydroxyindole acetic acid (5-HIAA), 5-hydroxytryptophan (5-HTP), kynurenine (K), kynurenic acid (KA), 3-hydroxykynurenine (3-HK), 3-hydroxyanthranilic acid (3-HAA), quinolinic acid, anthranilic acid, and combinations thereof. 5-HT is a molecule that plays a role in the regulation of gastrointestinal motility, secretion, and sensation. Imbalances in the levels of 5-HT are associated with several diseases including inflammatory bowel syndrome (IBS), autism, gastric ulcer formation, non-cardiac chest pain, and functional dyspepsia (see, e.g., Faure et al. (2010) Gastroenterology 139(1): 249-58 and Muller et al. (2016) Neuroscience 321: 24-41, and International Publication No. WO 2014/188377, each of which are incorporated herein by reference). Conversion of metabolites within the serotonin, tryptophan and/or kynurenine pathways affects the levels of 5-HT in a subject. Therefore, measuring the levels of one or more of the metabolites in this pathway may be used for the diagnosis, management and treatment of a disease or disorder associated with 5-HT imbalance including but not limited to IBS, autism, carcinoid syndrome, depression, hypertension, Alzheimer's disease, constipation, migraine, and serotonin syndrome. One or more analytes in the serotonin, tryptophan and/or kynurenine pathways can be detected and/or quantitated using, for example, methods and analyte-binding agents that bind to these metabolites including, e.g., antibodies, known in the art (see, e.g., International Publication No. WO2014/188377, the entire contents of which are expressly incorporated herein by reference).

[1442] In some embodiments, the analyte is a lactam having from 5 to 6 annular members selected from barbituates, e.g., phenobarbital and secobarbital, diphenylhydantonin, primidone, ethosuximide, and metabolites thereof.

[1443] In some embodiments, the analyte is an aminoalkylbenzene, with alkyl of from 2 to 3 carbon atoms, selected from the amphetamines; catecholamines, which includes ephedrine, L-dopa, epinephrine; narceine; papaverine; and metabolites thereof.

[1444] In some embodiments, the analyte is a benzheterocyclic selected from oxazepam, chlorpromazine, tegretol, their derivatives and metabolites, the heterocyclic rings being azepines, diazepines and phenothiazines.

[1445] In some embodiments, the analyte is a purine selected from theophylline, caffeine, their metabolites and derivatives.

[1446] In some embodiments, the analyte is marijuana, cannabinol or tetrahydrocannabinol.

[1447] In some embodiments, the analyte is a vitamin such as vitamin A, vitamin B, e.g. vitamin B₁₂, vitamin C, vitamin D, vitamin E and vitamin K, folic acid, thiamine.

[1448] In some embodiments, the analyte is selected from prostaglandins, which differ by the degree and sites of hydroxylation and unsaturation.

[1449] In some embodiments, the analyte is a tricyclic antidepressant selected from imipramine, dismethylimipramine, amitriptyline, nortriptyline, protriptyline, trimipramine, chlomipramine, doxepine, and desmethyldoxepin.

[1450] In some embodiments, the analyte is selected from anti-neoplastics, including methotrexate.

[1451] In some embodiments, the analyte is an antibiotic as described herein, including, but not limited to, penicillin, chloromycetin, actinomycetin, tetracycline, terramycin, and metabolites and derivatives.

[1452] In some embodiments, the analyte is a nucleoside and nucleotide selected from ATP, NAD, FMN, adenosine, guanosine, thymidine, and cytidine with their appropriate sugar and phosphate substituents.

[1453] In some embodiments, the analyte is selected from methadone, meprobamate, serotonin, meperidine, lidocaine, procainamide, acetylprocainamide, propranolol, griseofulvin, valproic acid, butyrophenones, antihistamines, chloramphenicol, anticholinergic drugs, such as atropine, their metabolites and derivatives.

[1454] In some embodiments, the analyte is a metabolite related to a diseased state. Such metabolites include, but are not limited to spermine, galactose, phenylpyruvic acid, and porphyrin Type 1.

[1455] In some embodiments, the analyte is an aminoglycoside, such as gentamicin, kanamicin, tobramycin, or amikacin.

[1456] In some embodiments, the analyte is a pesticide. Among pesticides of interest are polyhalogenated biphenyls, phosphate esters, thiophosphates, carbamates, polyhalogenated sulfenamides, their metabolites and derivatives.

[1457] In some embodiments, the analyte has a molecular weight of about 500 Da to about 1,000,000 Da (e.g., about 500 to about 500,000 Da, about 1,000 to about 100,000 Da).

[1458] In some embodiments, the analyte is a receptor, with a molecular weight ranging from 10,000 to 2×10⁸ Da, more usually from 10,000 to 10⁶ Da. For immunoglobulins, IgA, IgG, IgE and IgM, the molecular weights will generally vary from about 160,000 Da to about 10⁶ Da. Enzymes will normally range in molecular weight from about 10,000 Da to about 1,000,000 Da. Natural receptors vary widely, generally having a molecular weight of at least about 25,000 Da and may be 10⁶ or higher Da, including such materials as avidin, DNA, RNA, thyroxine binding globulin, thyroxine binding prealbumin, transcortin, etc.

[1459] In some embodiments, the term “analyte” further includes polynucleotide analytes such as those polynucleotides defined below. These include m-RNA, r-RNA, t-RNA, DNA, DNA-RNA duplexes, etc. The term analyte also includes polynucleotide-binding agents, such as, for example, restriction enzymes, trascription factors, transcription activators, transcription repressors, nucleases, polymerases, histones, DNA repair enzymes, intercalating gagents, chemotherapeutic agents, and the like.

[1460] In some embodiments, the analyte may be a molecule found directly in a sample such as a body fluid from a host. The sample can be examined directly or may be pretreated to render the analyte more readily detectible. Furthermore, the analyte of interest may be determined by detecting an agent probative of the analyte of interest (i.e., an analyte-binding agent), such as a specific binding pair member complementary to the analyte of interest, whose presence will be detected only when the analyte of interest is present in a sample. Thus, the agent probative of the analyte becomes the analyte that is detected in an assay.

[1461] In some embodiments, the analyte a nucleic acid (e.g., a bacterial DNA molecule or a bacterial RNA molecule (e.g., a bacterial tRNA, a transfer-messenger RNA (tmRNA)). See, e.g., Sjostrom et al. (2015) Scientific Reports 5: 15329; Ghosal (2017) Microbial Pathogenesis 104: 161-163; Shen et al. (2012) Cell Host Microbe. 12(4): 509-520.

[1462] In some embodiments, the analyte is a component of an outer membrane vesicle (OMV) (e.g., an OmpU protein, Elluri et al. (2014) PloS One 9: e106731). See, e.g., Kulp and Kuehn (2010) Annual Review of microbiology 64: 163-184; Berleman and Auer (2013) Environmental microbiology 15: 347-354; Wai et al. (1995) Microbiology and immunology 39: 451-456; Lindmark et al. (2009) BMC microbiology 9: 220; Sjostrom et al. (2015) Scientific Reports 5: 15329.

[1463] In some embodiments, the analyte is G-CSF, which can stimulate the bone marrow to produce granulocytes and stem cells and release them into the bloodstream.

[1464] In some embodiments, the analyte is an enzyme such as glutathione S-transferase. For example, the ingestible device can include P28GST, a 28 kDa helminth protein from Schistosoma with potent immunogenic and antioxidant properties. P28GST prevents intestinal inflammation in experimental colitis through a Th2-type response with mucosal eosinophils and can be recombinantly produced (e.g., in S. cerevisiae). See, for example, U.S. Pat. No. 9,593,313, Driss et al., Mucosal Immunology, 2016 9, 322-335; and Capron et al., Gastroenterology, 146(5):S-638.

[1465] In some embodiments, the analyte is a metabolite in the serotonin, tryptophan and/or kynurenine pathways, including but not limited to, serotonin (5-HT), 5-hydroxyindole acetic acid (5-HIAA), 5-hydroxytryptophan (5-HTP), kynurenine (K), kynurenic acid (KA), 3-hydroxykynurenine (3-HK), 3-hydroxyanthranilic acid (3-HAA), quinolinic acid, anthranilic acid, and combinations thereof.

[1466] In some embodiments, analytes are therapeutic agents or drugs. In some embodiments, analytes are biomarkers. The therapeutic agents disclosed herein are can also be analytes. Examples of biomarkers are provided herein.

[1467] In some embodiments, analytes are therapeutic agents, fragments thereof, and metabolites thereof (e.g., antibiotics). In some embodiments, the analytes are antibodies. In some embodiments, the analytes are antibiotics. Additional exemplary analytes (e.g., antibodies and antibiotics) are provided below.

[1468] a. Antibodies

[1469] In some embodiments, the analyte or the analyte-binding agent is an antibody. An “antibody” is an immunoglobulin molecule capable of specific binding to a target, such as a carbohydrate, polynucleotide, lipid, polypeptide, etc., through at least one antigen recognition site, located in the variable region of the immunoglobulin molecule. As used herein, the term encompasses not only intact polyclonal or monoclonal antibodies, but also fragments thereof (such as Fab, Fab′, F(ab′)2, Fv), single chain (ScFv) and domain antibodies), and fusion proteins including an antibody portion, and any other modified configuration of the immunoglobulin molecule that includes an antigen recognition site. The term antibody includes antibody fragments (e.g., antigen-binding fragments) such as an Fv fragment, a Fab fragment, a F(ab′)2 fragment, and a Fab′ fragment. Additional examples of antigen-binding fragments include an antigen-binding fragment of an IgG (e.g., an antigen-binding fragment of IgG1, IgG2, IgG3, or IgG4) (e.g., an antigen-binding fragment of a human or humanized IgG, e.g., human or humanized IgG1, IgG2, IgG3, or IgG4); an antigen-binding fragment of an IgA (e.g., an antigen-binding fragment of IgA1 or IgA2) (e.g., an antigen-binding fragment of a human or humanized IgA, e.g., a human or humanized IgA1 or IgA2); an antigen-binding fragment of an IgD (e.g., an antigen-binding fragment of a human or humanized IgD); an antigen-binding fragment of an IgE (e.g., an antigen-binding fragment of a human or humanized IgE); or an antigen-binding fragment of an IgM (e.g., an antigen-binding fragment of a human or humanized IgM). An antibody includes an antibody of any class, such as IgG, IgA, or IgM (or sub-class thereof), and the antibody need not be of any particular class. Depending on the antibody amino acid sequence of the constant domain of its heavy chains, immunoglobulins can be assigned to different classes. There are five major classes of immunoglobulins: IgA, IgD, IgE, IgG, and IgM, and several of these may be further divided into subclasses (isotypes), e.g., IgG1, IgG2, IgG3, IgG4, IgA1 and IgA2. The heavy-chain constant domains that correspond to the different classes of immunoglobulins are called alpha, delta, epsilon, gamma, and mu, respectively. The subunit structures and three-dimensional configurations of different classes of immunoglobulins are well known.

[1470] As used herein, “monoclonal antibody” refers to an antibody obtained from a population of substantially homogeneous antibodies, i.e., the individual antibodies including the population are identical except for possible naturally-occurring mutations that may be present in minor amounts. Monoclonal antibodies are highly specific, being directed against a single antigenic site. Furthermore, in contrast to polyclonal antibody preparations, which typically include different antibodies directed against different determinants (epitopes), each monoclonal antibody is directed against a single determinant on the antigen. The modifier “monoclonal” indicates the character of the antibody as being obtained from a substantially homogeneous population of antibodies, and is not to be construed as requiring production of the antibody by any particular method. For example, the monoclonal antibodies to be used in accordance with the present invention may be made by the hybridoma method first described by Kohler and Milstein, 1975, Nature 256:495, or may be made by recombinant DNA methods such as described in U.S. Pat. No. 4,816,567. The monoclonal antibodies may also be isolated from phage libraries generated using the techniques described in McCafferty et al., 1990, Nature 348:552-554, for example.

[1471] A “variable region” of an antibody refers to the variable region of the antibody light chain or the variable region of the antibody heavy chain, either alone or in combination. As known in the art, the variable regions of the heavy and light chain each consist of four framework regions (FR) connected by three complementarity determining regions (CDRs) that contain hypervariable regions. The CDRs in each chain are held together in close proximity by the FRs and, with the CDRs from the other chain, contribute to the formation of the antigen-binding site of antibodies. There are at least two techniques for determining CDRs: (1) an approach based on cross-species sequence variability (i.e., Kabat et al. Sequences of Proteins of Immunological Interest, (5th ed., 1991, National Institutes of Health, Bethesda Md.)); and (2) an approach based on crystallographic studies of antigen-antibody complexes (Al-Lazikani et al, 1997, J. Molec. Biol. 273:927-948). As used herein, a CDR may refer to CDRs defined by either approach or by a combination of both approaches.

[1472] As known in the art, a “constant region” of an antibody refers to the constant region of the antibody light chain or the constant region of the antibody heavy chain, either alone or in combination.

[1473] A “derivative” refers to any polypeptide (e.g., an antibody) having a substantially identical amino acid sequence to the naturally occurring polypeptide, in which one or more amino acids have been modified at side groups of the amino acids (e.g., an biotinylated protein or antibody). The term “derivative” shall also include any polypeptide (e.g., an antibody) which has one or more amino acids deleted from, added to, or substituted from the natural polypeptide sequence, but which retains a substantial amino acid sequence homology to the natural sequence. A substantial sequence homology is any homology greater than 50 percent.

[1474] In some embodiments, the antibody can be a humanized antibody, a chimeric antibody, a multivalent antibody, or a fragment thereof. In some embodiments, an antibody can be a scFv-Fc (Sokolowska-Wedzina et al., Mol. Cancer Res. 15(8):1040-1050, 2017), a VHH domain (Li et al., Immunol. Lett. 188:89-95, 2017), a VNAR domain (Hasler et al., Mol. Immunol. 75:28-37, 2016), a (scFv)₂, a minibody (Kim et al., PLoS One 10(1):e113442, 2014), or a BiTE. In some embodiments, an antibody can be a DVD-Ig (Wu et al., Nat. Biotechnol. 25(11):1290-1297, 2007; WO 08/024188; WO 07/024715), and a dual-affinity re-targeting antibody (DART) (Tsai et al., Mol. Ther. Oncolytics 3:15024, 2016), a triomab (Chelius et al., MAbs 2(3):309-319, 2010), kih IgG with a common LC (Kontermann et al., Drug Discovery Today 20(7):838-847, 2015), a crossmab (Regula et al., EMBO Mol. Med. 9(7):985, 2017), an ortho-Fab IgG (Kontermann et al., Drug Discovery Today 20(7):838-847, 2015), a 2-in-1-IgG (Kontermann et al., Drug Discovery Today 20(7):838-847, 2015), IgG-scFv (Cheal et al., Mol. Cancer Ther. 13(7):1803-1812, 2014), scFv2-Fc (Natsume et al., J. Biochem. 140(3):359-368, 2006), a bi-nanobody (Kontermann et al., Drug Discovery Today 20(7):838-847, 2015), tanden antibody (Kontermann et al., Drug Discovery Today 20(7):838-847, 2015), a DART-Fc (Kontermann et al., Drug Discovery Today 20(7):838-847, 2015), a scFv-HSA-scFv (Kontermann et al., Drug Discovery Today 20(7):838-847, 2015), DNL-Fab3 (Kontermann et al., Drug Discovery Today 20(7):838-847, 2015), DAF (two-in-one or four-in-one), DutaMab, DT-IgG, knobs-in-holes common LC, knobs-in-holes assembly, charge pair antibody, Fab-arm exchange antibody, SEEDbody, Triomab, LUZ-Y, Fcab, kλ-body, orthogonal Fab, DVD-IgG, IgG(H)-scFv, scFv-(H)IgG, IgG(L)-scFv, scFv-(L)-IgG, IgG (L,H)-Fc, IgG(H)-V, V(H)—IgG, IgG(L)-V, V(L)-IgG, KIH IgG-scFab, 2scFv-IgG, IgG-2scFv, scFv4-Ig, Zybody, DVI-IgG, nanobody (e.g., antibodies derived from Camelus bactriamus, Calelus dromaderius, or Lama paccos) (U.S. Pat. No. 5,759,808; Stijlemans et al., J. Biol. Chem. 279:1256-1261, 2004; Dumoulin et al., Nature 424:783-788, 2003; and Pleschberger et al., Bioconjugate Chem. 14:440-448, 2003), nanobody-HSA, a diabody (e.g., Poljak, Structure 2(12):1121-1123, 1994; Hudson et al., J. Immunol. Methods 23(1-2):177-189, 1999), a TandAb (Reusch et al., mAbs 6(3):727-738, 2014), scDiabody (Cuesta et al., Trends in Biotechnol. 28(7):355-362, 2010), scDiabody-CH3 (Sanz et al., Trends in Immunol. 25(2):85-91, 2004), Diabody-CH3 (Guo et al.), Triple Body, miniantibody, minibody, TriBi minibody, scFv-CH3 KIH, Fab-scFv, scFv-CH-CL-scFv, F(ab′)2-scFV2, scFv-KIH, Fab-scFv-Fc, tetravalent HCAb, scDiabody-Fc, diabody-Fc, tandem scFv-Fc, intrabody (Huston et al., Human Antibodies 10(3-4):127-142, 2001; Wheeler et al., Mol. Ther. 8(3):355-366, 2003; Stocks, Drug Discov. Today 9(22):960-966, 2004), dock and lock bispecific antibody, ImmTAC, HSAbody, scDiabody-HSA, tandem scFv, IgG-IgG, Cov-X-Body, and scFv1-PEG-scFv2.

[1475] In some embodiments, an antibody can be an IgNAR, a bispecific antibody (Milstein and Cuello, Nature 305:537-539, 1983; Suresh et al., Methods in Enzymology 121:210, 1986; WO 96/27011; Brennan et al., Science 229:81, 1985; Shalaby et al., J. Exp. Med. 175:217-225, 1992; Kolstelny et al., J. Immunol. 148(5):1547-1553, 1992; Hollinger et al., Proc. Nat. Acad. Sci. U.S.A. 90:6444-6448, 1993; Gruber et al., J. Immunol. 152:5368, 1994; Tutt et al., J. Immunol. 147:60, 1991), a bispecific diabody, a triabody (Schoonooghe et al., BMC Biotechnol. 9:70, 2009), a tetrabody, scFv-Fc knobs-into-holes, a scFv-Fc-scFv, a (Fab′scFv)₂, a V-IgG, a IvG-V, a dual V domain IgG, a heavy chain immunoglobulin or a camelid (Holt et al., Trends Biotechnol. 21(11):484-490, 2003), an intrabody, a monoclonal antibody (e.g., a human or humanized monoclonal antibody), a heteroconjugate antibody (e.g., U.S. Pat. No. 4,676,980), a linear antibody (Zapata et al., Protein Eng. 8(10:1057-1062, 1995), a trispecific antibody (Tutt et al., J. Immunol. 147:60, 1991), a Fabs-in-Tandem immunoglobulin (WO 15/103072), or a humanized camelid antibody.

[1476] In some embodiments, the antibody binds specifically to a metabolite in the serotonin, tryptophan and/or kynurenine pathways, including but not limited to, serotonin (5-HT), 5-hydroxyindole acetic acid (5-HIAA), 5-hydroxytryptophan (5-HTP), kynurenine (K), kynurenic acid (KA), 3-hydroxykynurenine (3-HK), 3-hydroxyanthranilic acid (3-HAA), quinolinic acid, anthranilic acid. Exemplary antibodies that bind to metabolites in these pathways are disclosed, for example, in International Publication No. WO2014/188377, the entire contents of which are incorporated herein by reference.

[1477] In some embodiments, the antibody is specific for a particular genus, species, or strain of a microorganism, and may therefore be used for the detection, analysis and/or quantitation of the microorganism using the detection methods described below. In some embodiments, the antibody specifically binds to a surface-specific biomolecule (e.g., a pilus subunit or a flagella protein) present in a particular genus, species or strain of microorganism, and does not cross-react with other microorganisms. In some embodiments, these antibodies may be used in the methods described herein to diagnose a subject with a particular infection or disease, or to monitor an infection (e.g., during or after treatment). In some embodiments, the antibody specifically binds to an antigen present in a particular genera, species or strain of a microorganism. Exemplary antigens, the corresponding microorganism that can be detected, and the disease caused by the microorganism (in parentheticals) include: outer membrane protein A OmpA (Acinetobacter baumannii, Acinetobacter infections)); HIV p24 antigen, HIV Eenvelope proteins (Gp120, Gp41, Gp160) (HIV (Human immunodeficiency virus), AIDS (Acquired immunodeficiency syndrome)); galactose-inhibitable adherence protein GIAP, 29 kDa antigen Eh29, GaVGaINAc lectin, protein CRT, 125 kDa immunodominant antigen, protein M17, adhesin ADH112, protein STIRP (Entamoeba histolytica, Amoebiasis); protective Antigen PA, edema factor EF, lethal facotor LF, the S-layer homology proteins SLH (Bacillus anthracis, Anthrax); nucleocapsid protein NP, glycoprotein precursor GPC, glycoprotein GP1, glycoprotein GP2 (Junin virus, Argentine hemorrhagic fever); 41 kDa allergen Asp v13, allergen Asp f3, major conidial surface protein rodlet A, protease Pep1p, GPI-anchored protein Gellp, GPI-anchored protein Crflp (Aspergillus genus, Aspergillosis); outer surface protein A OspA, outer surface protein OspB, outer surface protein OspC, decorin binding protein A DbpA, flagellar filament 41 kDa core protein Fla, basic membrane protein A precursor BmpA (Immunodominant antigen P39), outer surface 22 kDa lipoprotein precursor (antigen IPLA7), variable surface lipoprotein vIsE (Borrelia genus, Borrelia infection); OmpA-like transmembrane domain-containing protein Omp31, immunogenic 39-kDa protein M5 P39, 25 kDa outer-membrane immunogenic protein precursor Omp25, outer membrane protein MotY Omp16, conserved outer membrane protein D15, malate dehydrogenase Mdh, component of the Type-IV secretion system (T4SS) VirJ, lipoprotein of unknown function BAB1-0187 (Brucella genus, Brucellosis); major outer membrane protein PorA, flagellin FIaA, surface antigen CjaA, fibronectin binding protein CadF, aspartate/glutamate-binding ABC transporter protein Peb1A, protein FspA1, protein FspA2 (Campylobacter genus, Campylobacteriosis); glycolytic enzyme enolase, secreted aspartyl proteinases SAP1-10, glycophosphatidylinositol (GPI)-linked cell wall protein, adhesin Als3p, cell surface hydrophobicity protein CSH (usually Candida albicans and other Candida species, Candidiasis); envelope glycoproteins (gB, gC, gE, gH, gI, gK, gL) (Varicella zoster virus (VZV), Chickenpox); major outer membrane protein MOMP, probable outer membrane protein PMPC, outer membrane complex protein B OmcB (Chlamydia trachomatis, Chlamydia); major outer membrane protein MOMP, outer membrane protein 2 Omp2, (Chlamydophila pneumoniae, Chlamydophila pneumoniae infection); outer membrane protein U Porin ompU, (Vibrio cholerae, Cholera); surface layer proteins SLPs, Cell Wall Protein CwpV, flagellar protein FliC, flagellar protein FliD (Clostridium difficile, Clostridium difficile infection); acidic ribosomal protein P2 CpP2, mucin antigens Muc1, Muc2, Muc3 Muc4, Muc5, Muc6, Muc7, surface adherence protein CP20, surface adherence protein CP23, surface protein CP12, surface protein CP21, surface protein CP40, surface protein CP60, surface protein CP15, surface-associated glycopeptides gp40, surface-associated glycopeptides gp15, oocyst wall protein AB, profilin PRF, apyrase (Cryptosporidium genus, Cryptosporidiosis); membrane protein pp15, capsid-proximal tegument protein pp150 (Cytomegalovirus, Cytomegalovirus infection); prion protein (vCJD prion, Variant Creutzfeldt-Jakob disease (vCJD, nvCJD)); cyst wall proteins CWP1, CWP2, CWP3, variant surface protein VSP, VSP1, VSP2, VSP3, VSP4, VSP5, VSP6, 56 kDa antigen (Giardia intestinalis, Giardiasis); minor pilin-associated subunit pilC, major pilin subunit and variants pilE, pilS (Neisseria gonorrhoeae, Gonorrhea); outer membrane protein A OmpA, outer membrane protein C OmpC, outer membrane protein K17 OmpK17 (Klebsiella granulomatis, Granuloma inguinale (Donovanosis)); fibronectin-binding protein Sfb (Streptococcus pyogenes, Group A streptococcal infection); outer membrane protein P6 (Haemophilus influenzae, Haemophilus influenzae infection); integral membrane proteins, aggregation-prone proteins, O-antigen, toxin-antigens Stx2B, toxin-antigen Stx1B, adhesion-antigen fragment Int28, protein EspA, protein EspB, Intimin, protein Tir, protein IntC300, protein Eae (Escherichia coli O157:H7, O111 and O104:H4, Hemolytic-uremic syndrome (HUS)); hepatitis A surface antigen HBAg (Hepatitis A Virus, Hepatitis A); hepatitis B surface antigen HBsAg (Hepatitis B Virus, Hepatitis B); envelope glycoprotein E1 gp32 gp35, envelope glycoprotein E2 NS1 gp68 gp70, capsid protein C, (Hepatitis C Virus, Hepatitis C); type IV pilin PilE, outer membrane protein MIP, major outer membrane protein MompS (Legionella pneumophila, Legionellosis (Legionnaires' disease, Pontiac fever)); minor pilin-associated subunit pilC, major pilin subunit and variants pilE, pilS (Neisseria meningitidis, Meningococcal disease); adhesin P1, adhesion P30 (Mycoplasmapneumoniae, Mycoplasma pneumonia); F1 capsule antigen, outer membrane protease Pla, (Yersiniapestis, Plague); surface adhesin PsaA, cell wall surface anchored protein psrP (Streptococcus pneumoniae, Pneumococcal infection); flagellin FliC, invasion protein SipC, glycoprotein gp43, outer membrane protein LamB, outer membrane protein PagC, outer membrane protein TolC, outer membrane protein NmpC, outer membrane protein FadL, transport protein SadA (Salmonella genus, Salmonellosis); collagen adhesin Cna, fibronectin-binding protein A FnbA, secretory antigen SssA (Staphylococcus genus, Staphylococcal food poisoning); collagen adhesin Can (Staphylococcus genus, Staphylococcal infection); fibronectin-binding protein A FbpA (Ag85A), fibronectin-binding protein D FbpD, fibronectin-binding protein C FbpC1, heat-shock protein HSP65, protein PST-S (Mycobacterium tuberculosis, Tuberculosis); and outer membrane protein FobA, outer membrane protein FobB, type IV pili glycosylation protein, outer membrane protein tolC, protein TolQ (Francisella tularensis, Tularemia). Additional exemplary microorganisms and corresponding antigens are disclosed, e.g., in U.S. Publication No. 2015/0118264, the entire contents of which are expressly incorporated herein by reference.

[1478] In some embodiments, a plurality of antibodies (e.g., 2, 3, 4, 5, 6, 7, 8, 9, 10, 15, 20, 25, 30, or more antibodies) are used as analyte-binding agents in any of the methods described herein (e.g., to detect the presence of one or more analytes in a sample). In some embodiments, the plurality of antibodies bind to the same analyte (e.g., an antigen). In some embodiments, the plurality of antibodes bind to the same epitope present on the analyte (e.g., an antigen). In some embodiments, the plurality of antibodies bind to different epitopes present on the same analyte. In some embodiments, the plurality of antibodies bind to overlapping epitopes present on the same analyte. In some embodiments, the plurality of antibodies bind to non-overlapping epitopes present on the same analyte.

### Antibiotics

[1479] In some embodiments, the analyte or analyte-binding agent is an antibiotic. An “antibiotic” or “antibiotic agent” refers to a substance that has the capacity to inhibit or slow down the growth of, or to destroy bacteria and/or other microorganisms. In some embodiments, the antibiotic agent is a bacteriostatic antibiotic agent. In some embodiments, the antibiotic is a bacteriolytic antibiotic agent. Exemplary antibiotic agents are set forth in the U.S. Patent Publication US 2006/0269485, which is hereby incorporated by reference herein in its entirety.

[1480] In some embodiments, the antibiotic agent is selected from the classes consisting of beta-lactam antibiotics, aminoglycosides, ansa-type antibiotics, anthraquinones, antibiotic azoles, antibiotic glycopeptides, macrolides, antibiotic nucleosides, antibiotic peptides, antibiotic polyenes, antibiotic polyethers, quinolones, antibiotic steroids, sulfonamides, tetracycline, dicarboxylic acids, antibiotic metals, oxidizing agents, substances that release free radicals and/or active oxygen, cationic antimicrobial agents, quaternary ammonium compounds, biguanides, triguanides, bisbiguanides and analogs and polymers thereof and naturally occurring antibiotic compounds. In some embodiments, the antibiotic is rifaximin.

[1481] Beta-lactam antibiotics include, but are not limited to, 2-(3-alanyl)clavam, 2-hydroxymethylclavam, 8-epi-thienamycin, acetyl-thienamycin, amoxicillin, amoxicillin sodium, amoxicillin trihydrate, amoxicillin-potassium clavulanate combination, ampicillin, ampicillin sodium, ampicillin trihydrate, ampicillin-sulbactam, apalcillin, aspoxicillin, azidocillin, azlocillin, aztreonam, bacampicillin, biapenem, carbenicillin, carbenicillin disodium, carfecillin, carindacillin, carpetimycin, cefacetril, cefaclor, cefadroxil, cefalexin, cefaloridine, cefalotin, cefamandole, cefamandole, cefapirin, cefatrizine, cefatrizine propylene glycol, cefazedone, cefazolin, cefbuperazone, cefcapene, cefcapene pivoxil hydrochloride, cefdinir, cefditoren, cefditoren pivoxil, cefepime, cefetamet, cefetamet pivoxil, cefixime, cefinenoxime, cefinetazole, cefminox, cefminox, cefmolexin, cefodizime, cefonicid, cefoperazone, ceforanide, cefoselis, cefotaxime, cefotetan, cefotiam, cefoxitin, cefozopran, cefpiramide, cefpirome, cefpodoxime, cefpodoxime proxetil, cefprozil, cefquinome, cefradine, cefroxadine, cefsulodin, ceftazidime, cefteram, cefteram pivoxil, ceftezole, ceftibuten, ceftizoxime, ceftriaxone, cefuroxime, cefuroxime axetil, cephalosporin, cephamycin, chitinovorin, ciclacillin, clavulanic acid, clometocillin, cloxacillin, cycloserine, deoxy pluracidomycin, dicloxacillin, dihydro pluracidomycin, epicillin, epithienamycin, ertapenem, faropenem, flomoxef, flucloxacillin, hetacillin, imipenem, lenampicillin, loracarbef, mecillinam, meropenem, metampicillin, meticillin, mezlocillin, moxalactam, nafcillin, northienamycin, oxacillin, panipenem, penamecillin, penicillin, phenethicillin, piperacillin, tazobactam, pivampicillin, pivcefalexin, pivmecillinam, pivmecillinam hydrochloride, pluracidomycin, propicillin, sarmoxicillin, sulbactam, sulbenicillin, talampicillin, temocillin, terconazole, thienamycin, ticarcillin and analogs, salts and derivatives thereof.

[1482] Aminoglycosides include, but are not limited to, 1,2′-N-DL-isoseryl-3′,4′-dideoxykanamycin B, 1,2′-N-DL-isoseryl-kanamycin B, 1,2′-N—[(S)-4-amino-2-hydroxybutyryl]-3′,4′-dideoxykanamycin B, 1,2′-N—[(S)-4-amino-2-hydroxybutyryl]-kanamycin B, 1-N-(2-Aminobutanesulfonyl) kanamycin A, 1-N-(2-aminoethanesulfonyl)3′,4′-dideoxyribostamycin, 1-N-(2-Aminoethanesulfonyl)3′-deoxyribostamycin, 1-N-(2-aminoethanesulfonyl)3′4′-dideoxykanamycin B, 1-N-(2-aminoethanesulfonyl)kanamycin A, 1-N-(2-aminoethanesulfonyl)kanamycin B, 1-N-(2-aminoethanesulfonyl)ribostamycin, 1-N-(2-aminopropanesulfonyl)3′-deoxykanamycin B, 1-N-(2-aminopropanesulfonyl)3′4′-dideoxykanamycin B, 1-N-(2-aminopropanesulfonyl)kanamycin A, 1-N-(2-aminopropanesulfonyl)kanamycin B, 1-N-(L-4-amino-2-hydroxy-butyryl)2,′3′-dideoxy-2′-fluorokanamycin A, 1-N-(L-4-amino-2-hydroxy-propionyl)2,′3′-dideoxy-2′-fluorokanamycin A, 1-N-DL-3′,4′-dideoxy-isoserylkanamycin B, 1-N-DL-isoserylkanamycin, 1-N-DL-isoserylkanamycin B, 1-N-[L-(−)-(alpha-hydroxy-gamma-aminobutyryl)]-λK-62-2,2′,3′-dideoxy-2′-fluorokanamycin A,2-hydroxygentamycin A3,2-hydroxygentamycin B, 2-hydroxygentamycin B1, 2-hydroxygentamycin JI-20A, 2-hydroxygentamycin JI-20B, 3″-N-methyl-4″-C-methyl-3′,4′-dodeoxy kanamycin A, 3″-N-methyl-4″-C-methyl-3′,4′-dodeoxy kanamycin B, 3″-N-methyl-4″-C-methyl-3′,4′-dodeoxy-6′-methyl kanamycin B, 3′,4′-Dideoxy-3′-eno-ribostamycin,3′,4′-dideoxyneamine,3′,4′-dideoxyribostamycin, 3′-deoxy-6′-N-methyl-kanamycin B,3′-deoxyneamine,3′-deoxyribostamycin, 3′-oxysaccharocin,3,3′-nepotrehalosadiamine, 3-demethoxy-2″-N-formimidoylistamycin B disulfate tetrahydrate, 3-demethoxyistamycin B,3-O-demethyl-2-N-formimidoylistamycin B, 3-O-demethylistamycin B,3-trehalosamine,4″,6″-dideoxydibekacin, 4-N-glycyl-KA-6606VI, 538-Amino-3′,4′,5″-trideoxy-butirosin A, 6″-deoxydibekacin,6′-epifortimicin A, 6-deoxy-neomycin (structure 6-deoxy-neomycin B),6-deoxy-neomycin B, 6-deoxy-neomycin C, 6-deoxy-paromomycin, acmimycin, AHB-3′,4′-dideoxyribostamycin, AHB-3′-deoxykanamycin B, AHB-3′-deoxyneamine, AHB-3′-deoxyribostamycin, AHB-4″-6″-dideoxydibekacin, AHB-6″-deoxydibekacin, AHB-dideoxyneamine, AHB-kanamycin B, AHB-methyl-3′-deoxykanamycin B, amikacin, amikacin sulfate, apramycin, arbekacin, astromicin, astromicin sulfate, bekanamycin, bluensomycin, boholmycin, butirosin, butirosin B, catenulin, coumamidine gamma1, coumamidine gamma 2,D,L-1-N-(alpha-hydroxy-beta-aminopropionyl)-XK-62-2, dactimicin, de-O-methyl-4-N-glycyl-KA-6606VI, de-O-methyl-KA-6606I, de-O-methyl-KA-7038I, destomycin A, destomycin B, di-N6′,O3-demethylistamycin A, dibekacin, dibekacin sulfate, dihydrostreptomycin, dihydrostreptomycin sulfate, epi-formamidoylglycidylfortimicin B, epihygromycin, formimidoyl-istamycin A, formimidoyl-istamycin B, fortimicin B, fortimicin C, fortimicin D, fortimicin KE, fortimicin KF, fortimicin KG, fortimicin KG1 (stereoisomer KG1/KG2), fortimicin KG2 (stereoisomer KG1/KG2), fortimicin KG3, framycetin, framycetin sulphate, gentamicin, gentamycin sulfate, globeomycin, hybrimycin A1, hybrimycin A2, hybrimycin B1, hybrimycin B2, hybrimycin C1, hybrimycin C2, hydroxystreptomycin, hygromycin, hygromycin B, isepamicin, isepamicin sulfate, istamycin, kanamycin, kanamycin sulphate, kasugamycin, lividomycin, marcomycin, micronomicin, micronomicin sulfate, mutamicin, myomycin, N-demethyl-7-O-demethylcelesticetin, demethylcelesticetin, methanesulfonic acid derivative of istamycin, nebramycin, nebramycin, neomycin, netilmicin, oligostatin, paromomycin, quintomycin, ribostamycin, saccharocin, seldomycin, sisomicin, sorbistin, spectinomycin, streptomycin, tobramycin, trehalosmaine, trestatin, validamycin, verdamycin, xylostasin, zygomycin and analogs, salts and derivatives thereof.

[1483] Ansa-type antibiotics include, but are not limited to, 21-hydroxy-25-demethyl-25-methylth ioprotostreptovaricin, 3-methylth iorifamycin, ansamitocin, atropisostreptovaricin, awamycin, halomicin, maytansine, naphthomycin, rifabutin, rifamide, rifampicin, rifamycin, rifapentine, rifaximin (e.g., Xifaxan®), rubradirin, streptovaricin, tolypomycin and analogs, salts and derivatives thereof.

[1484] Antibiotic anthraquinones include, but are not limited to, auramycin, cinerubin, ditrisarubicin, ditrisarubicin C, figaroic acid fragilomycin, minomycin, rabelomycin, rudolfomycin, sulfurmycin and analogs, salts and derivatives thereof.

[1485] Antibiotic azoles include, but are not limited to, azanidazole, bifonazole, butoconazol, chlormidazole, chlormidazole hydrochloride, cloconazole, cloconazole monohydrochloride, clotrimazol, dimetridazole, econazole, econazole nitrate, enilconazole, fenticonazole, fenticonazole nitrate, fezatione, fluconazole, flutrimazole, isoconazole, isoconazole nitrate, itraconazole, ketoconazole, lanoconazole, metronidazole, metronidazole benzoate, miconazole, miconazole nitrate, neticonazole, nimorazole, niridazole, omoconazol, ornidazole, oxiconazole, oxiconazole nitrate, propenidazole, secnidazol, sertaconazole, sertaconazole nitrate, sulconazole, sulconazole nitrate, tinidazole, tioconazole, voriconazol and analogs, salts and derivatives thereof.

[1486] Antibiotic glycopeptides include, but are not limited to, acanthomycin, actaplanin, avoparcin, balhimycin, bleomycin B (copper bleomycin), chloroorienticin, chloropolysporin, demethylvancomycin, enduracidin, galacardin, guanidylfungin, hachimycin, demethylvancomycin, N-nonanoyl-teicoplanin, phleomycin, platomycin, ristocetin, staphylocidin, talisomycin, teicoplanin, vancomycin, victomycin, xylocandin, zorbamycin and analogs, salts and derivatives thereof.

[1487] Macrolides include, but are not limited to, acetylleucomycin, acetylkitasamycin, angolamycin, azithromycin, bafilomycin, brefeldin, carbomycin, chalcomycin, cirramycin, clarithromycin, concanamycin, deisovaleryl-niddamycin, demycinosyl-mycinamycin, Di-O-methyltiacumicidin, dirithromycin, erythromycin, erythromycin estolate, erythromycin ethyl succinate, erythromycin lactobionate, erythromycin stearate, flurithromycin, focusin, foromacidin, haterumalide, haterumalide, josamycin, josamycin ropionate, juvenimycin, juvenimycin, kitasamycin, ketotiacumicin, lankavacidin, lankavamycin, leucomycin, machecin, maridomycin, megalomicin, methylleucomycin, methymycin, midecamycin, miocamycin, mycaminosyltylactone, mycinomycin, neutramycin, niddamycin, nonactin, oleandomycin, phenylacetyideltamycin, pamamycin, picromycin, rokitamycin, rosaramicin, roxithromycin, sedecamycin, shincomycin, spiramycin, swalpamycin, tacrolimus, telithromycin, tiacumicin, tilmicosin, treponemycin, troleandomycin, tylosin, venturicidin and analogs, salts and derivatives thereof.

[1488] Antibiotic nucleosides include, but are not limited to, amicetin, angustmycin, azathymidine, blasticidin S, epiroprim, flucytosine, gougerotin, mildiomycin, nikkomycin, nucleocidin, oxanosine, oxanosine, puromycin, pyrazomycin, showdomycin, sinefungin, sparsogenin, spicamycin, tunicamycin, uracil polyoxin, vengicide and analogs, salts and derivatives thereof.

[1489] Antibiotic peptides include, but are not limited to, actinomycin, aculeacin, alazopeptin, amfomycin, amythiamycin, antifungal from Zalerion arboricola, antrimycin, apid, apidaecin, aspartocin, auromomycin, bacileucin, bacillomycin, bacillopeptin, bacitracin, bagacidin, beminamycin, beta-alanyl-L-tyrosine, bottromycin, capreomycin, caspofungine, cepacidine, cerexin, cilofungin, circulin, colistin, cyclodepsipeptide, cytophagin, dactinomycin, daptomycin, decapeptide, desoxymulundocandin, echanomycin, echinocandin B, echinomycin, ecomycin, enniatin, etamycin, fabatin, ferrimycin, ferrimycin, ficellomycin, fluoronocathiacin, fusaricidin, gardimycin, gatavalin, globopeptin, glyphomycin, gramicidin, herbicolin, iomycin, iturin, iyomycin, izupeptin, janiemycin, janthinocin, jolipeptin, katanosin, killertoxin, lipopeptide antibiotic, lipopeptide from Zalerion sp., lysobactin, lysozyme, macromomycin, magainin, melittin, mersacidin, mikamycin, mureidomycin, mycoplanecin, mycosubtilin, neopeptifluorin, neoviridogrisein, netropsin, nisin, nocathiacin, nocathiacin 6-deoxyglycoside, nosiheptide, octapeptin, pacidamycin, pentadecapeptide, peptifluorin, permetin, phytoactin, phytostreptin, planothiocin, plusbacin, polcillin, polymyxin antibiotic complex, polymyxin B, polymyxin B1, polymyxin F, preneocarzinostatin, quinomycin, quinupristin-dalfopristin, safracin, salmycin, salmycin, salmycin, sandramycin, saramycetin, siomycin, sperabillin, sporamycin, a Streptomyces compound, subtilin, teicoplanin aglycone, telomycin, thermothiocin, thiopeptin, thiostrepton, tridecaptin, tsushimycin, tuberactinomycin, tuberactinomycin, tyrothricin, valinomycin, viomycin, virginiamycin, zervacin and analogs, salts and derivatives thereof.

[1490] In some embodiments, the antibiotic peptide is a naturally-occurring peptide that possesses an antibacterial and/or an antifungal activity. Such peptide can be obtained from an herbal or a vertebrate source.

[1491] Polyenes include, but are not limited to, amphotericin, amphotericin, aureofungin, ayfactin, azalomycin, blasticidin, candicidin, candicidin methyl ester, candimycin, candimycin methyl ester, chinopricin, filipin, flavofungin, fradicin, hamycin, hydropricin, levorin, lucensomycin, lucknomycin, mediocidin, mediocidin methyl ester, mepartricin, methylamphotericin, natamycin, niphimycin, nystatin, nystatin methyl ester, oxypricin, partricin, pentamycin, perimycin, pimaricin, primycin, proticin, rimocidin, sistomycosin, sorangicin, trichomycin and analogs, salts and derivatives thereof.

[1492] Polyethers include, but are not limited to, 20-deoxy-epi-narasin, 20-deoxysalinomycin, carriomycin, dianemycin, dihydrolonomycin, etheromycin, ionomycin, iso-lasalocid, lasalocid, lenoremycin, lonomycin, lysocellin, monensin, narasin, oxolonomycin, a polycyclic ether antibiotic, salinomycin and analogs, salts and derivatives thereof.

[1493] Quinolones include, but are not limited to, an alkyl-methylendioxy-4(1H)-oxocinnoline-3-carboxylic acid, alatrofloxacin, cinoxacin, ciprofloxacin, ciprofloxacin hydrochloride, danofloxacin, dermofongin A, enoxacin, enrofloxacin, fleroxacin, flumequine, gatifloxacin, gemifloxacin, grepafloxacin, levofloxacin, lomefloxacin, lomefloxacin, hydrochloride, miloxacin, moxifloxacin, nadifloxacin, nalidixic acid, nifuroquine, norfloxacin, ofloxacin, orbifloxacin, oxolinic acid, pazufloxacine, pefloxacin, pefloxacin mesylate, pipemidic acid, piromidic acid, premafloxacin, rosoxacin, rufloxacin, sparfloxacin, temafloxacin, tosufloxacin, trovafloxacin and analogs, salts and derivatives thereof.

[1494] Antibiotic steroids include, but are not limited to, aminosterol, ascosteroside, cladosporide A, dihydrofusidic acid, dehydro-dihydrofusidic acid, dehydrofusidic acid, fusidic acid, squalamine and analogs, salts and derivatives thereof.

[1495] Sulfonamides include, but are not limited to, chloramine, dapsone, mafenide, phthalylsulfathiazole, succinylsulfathiazole, sulfabenzamide, sulfacetamide, sulfachlorpyridazine, sulfadiazine, sulfadiazine silver, sulfadicramide, sulfadimethoxine, sulfadoxine, sulfaguanidine, sulfalene, sulfamazone, sulfamerazine, sulfamethazine, sulfamethizole, sulfamethoxazole, sulfamethoxypyridazine, sulfamonomethoxine, sulfamoxol, sulfanilamide, sulfaperine, sulfaphenazol, sulfapyridine, sulfaquinoxaline, sulfasuccinamide, sulfathiazole, sulfathiourea, sulfatolamide, sulfatriazin, sulfisomidine, sulfisoxazole, sulfisoxazole acetyl, sulfacarbamide and analogs, salts and derivatives thereof.

[1496] Tetracyclines include, but are not limited to, dihydrosteffimycin, demethyltetracycline, aclacinomycin, akrobomycin, baumycin, bromotetracycline, cetocyclin, chlortetracycline, clomocycline, daunorubicin, demeclocycline, doxorubicin, doxorubicin hydrochloride, doxycycline, lymecyclin, marcellomycin, meclocycline, meclocycline sulfosalicylate, methacycline, minocycline, minocycline hydrochloride, musettamycin, oxytetracycline, rhodirubin, rolitetracycline, rubomycin, serirubicin, steffimycin, tetracycline and analogs, salts and derivatives thereof.

[1497] Dicarboxylic acids, having between about 6 and about 14 carbon atoms in their carbon atom skeleton are particularly useful in the treatment of disorders of the skin and mucosal membranes that involve microbial. Suitable dicarboxylic acid moieties include, but are not limited to, adipic acid, pimelic acid, suberic acid, azelaic acid, sebacic acid, 1,11-undecanedioic acid, 1,12-dodecanedioic acid, 1,13-tridecanedioic acid and 1,14-tetradecanedioic acid. Thus, in one or more embodiments of the present disclosure, dicarboxylic acids, having between about 6 and about 14 carbon atoms in their carbon atom skeleton, as well as their salts and derivatives (e.g., esters, amides, mercapto-derivatives, anhydraides), are useful immunomodulators in the treatment of disorders of the skin and mucosal membranes that involve inflammation. Azelaic acid and its salts and derivatives are preferred. It has antibacterial effects on both aerobic and anaerobic organisms, particularly Propionibacterium acnes and Staphylococcus epidermidis, normalizes keratinization, and has a cytotoxic effect on malignant or hyperactive melanocytes. In a preferred embodiment, the dicarboxylic acid is azelaic acid in a concentration greater than 10%. Preferably, the concentration of azelaic acid is between about 10% and about 25%. In such concentrates, azelaic acid is suitable for the treatment of a variety of skin disorders, such as acne, rosacea and hyperpigmentation.

[1498] In some embodiments, the antibiotic agent is an antibiotic metal. A number of metals ions have been shown to possess antibiotic activity, including silver, copper, zinc, mercury, tin, lead, bismutin, cadmium, chromium and ions thereof. It has been theorized that these antibiotic metal ions exert their effects by disrupting respiration and electron transport systems upon absorption into bacterial or fungal cells. Anti-microbial metal ions of silver, copper, zinc, and gold, in particular, are considered safe for in vivo use. Anti-microbial silver and silver ions are particularly useful due to the fact that they are not substantially absorbed into the body. Thus, in one or more embodiment, the antibiotic metal consists of an elemental metal, selected from the group consisting of silver, copper, zinc, mercury, tin, lead, bismutin, cadmium, chromium and gold, which is suspended in the composition as particles, microparticles, nanoparticles or colloidal particles. The antibiotic metal can further be intercalated in a chelating substrate.

[1499] In further embodiments, the antibiotic metal is ionic. The ionic antibiotic metal can be presented as an inorganic or organic salt (coupled with a counterion), an organometallic complex or an intercalate. Non-binding examples of counter inorganic and organic ions are sulfadiazine, acetate, benzoate, carbonate, iodate, iodide, lactate, laurate, nitrate, oxide, and palmitate, a negatively charged protein. In preferred embodiments, the antibiotic metal salt is a silver salt, such as silver acetate, silver benzoate, silver carbonate, silver iodate, silver iodide, silver lactate, silver laurate, silver nitrate, silver oxide, silver palmitate, silver protein, and silver sulfadiazine.

[1500] In one or more embodiments, the antibiotic metal or metal ion is embedded into a substrate, such as a polymer, or a mineral (such as zeolite, clay and silica).

[1501] In one or more embodiments, the antibiotic agent includes strong oxidants and free radical liberating compounds, such as oxygen, hydrogen peroxide, benzoyl peroxide, elemental halogen species, as well as oxygenated halogen species, bleaching agents (e.g., sodium, calcium or magnesium hypochloride and the like), perchlorite species, iodine, iodate, and benzoyl peroxide. Organic oxidizing agents, such as quinones, are also included. Such agents possess a potent broad-spectrum activity.

[1502] In one or more embodiments, the antibiotic agent is a cationic antimicrobial agent. The outermost surface of bacterial cells universally carries a net negative charge, making them sensitive to cationic substances. Examples of cationic antibiotic agents include: quaternary ammonium compounds (QAC's)-QAC's are surfactants, generally containing one quaternary nitrogen associated with at least one major hydrophobic moiety; alkyltrimethyl ammonium bromides are mixtures of where the alkyl group is between 8 and 18 carbons long, such as cetrimide (tetradecyltrimethylammonium bromide); benzalkonium chloride, which is a mixture of n-alkyldimethylbenzyl ammonium chloride where the alkyl groups (the hydrophobic moiety) can be of variable length; dialkylmethyl ammonium halides; dialkylbenzyl ammonium halides; and QAC dimmers, which bear bi-polar positive charges in conjunction with interstitial hydrophobic regions.

[1503] In one or more embodiments, the cationic antimicrobial agent is a polymer. Cationic antimicrobial polymers include, for example, guanide polymers, biguanide polymers, or polymers having side chains containing biguanide moieties or other cationic functional groups, such as benzalkonium groups or quarternium groups (e.g., quaternary amine groups). It is understood that the term “polymer” as used herein includes any organic material including three or more repeating units, and includes oligomers, polymers, copolymers, block copolymers, terpolymers, etc. The polymer backbone may be, for example a polyethylene, ploypropylene or polysilane polymer.

[1504] In one or more embodiments, the cationic antimicrobial polymer is a polymeric biguanide compound. When applied to a substrate, such a polymer is known to form a barrier film that can engage and disrupt a microorganism. An exemplary polymeric biguanide compound is polyhexamethylene biguanide (PHMB) salts. Other exemplary biguanide polymers include, but are not limited to poly(hexamethylenebiguanide), poly(hexamethylenebiguanide) hydrochloride, poly(hexamethylenebiguanide) gluconate, poly(hexamethylenebiguanide) stearate, or a derivative thereof. In one or more embodiments, the antimicrobial material is substantially water-insoluble.

[1505] In some embodiments, the antibiotic agent is selected from the group of biguanides, triguanides, bisbiguanides and analogs thereof.

[1506] Guanides, biguanides, biguanidines and triguanides are unsaturated nitrogen containing molecules that readily obtain one or more positive charges, which make them effective antimicrobial agents. The basic structures a guanide, a biguanide, a biguanidine and a triguanide are provided below.

[chemical structure]

In some embodiments, the guanide, biguanide, biguanidine or triguanide, provide bi-polar configurations of cationic and hydrophobic domains within a single molecule.

[1507] Examples of guanides, biguanides, biguanidines and triguanides that are currently been used as antibacterial agents include chlorhexidine and chlorohexidine salts, analogs and derivatives, such as chlorhexidine acetate, chlorhexidine gluconate and chlorhexidine hydrochloride, picloxydine, alexidine and polihexanide. Other examples of guanides, biguanides, biguanidines and triguanides that can conceivably be used according to the present disclosure are chlorproguanil hydrochloride, proguanil hydrochloride (currently used as antimalarial agents), mefformin hydrochloride, phenformin and buformin hydrochloride (currently used as antidiabetic agents).

[1508] Yet, in one or more embodiments, the antibiotic is a non-classified antibiotic agent, including, without limitation, aabomycin, acetomycin, acetoxycycloheximide, acetylnanaomycin, an Actinoplanes sp. compound, actinopyrone, aflastatin, albacarcin, albacarcin, albofungin, albofungin, alisamycin, alpha-R,S-methoxycarbonylbenzylmonate, altromycin, amicetin, amycin, amycin demanoyl compound, amycine, amycomycin, anandimycin, anisomycin, anthramycin, anti-syphilis immune substance, anti-tuberculosis immune substance, an antibiotic from Escherichia coli, an antibiotic from Streptomyces refuineus, anticapsin, antimycin, aplasmomycin, aranorosin, aranorosinol, arugomycin, ascofuranone, ascomycin, ascosin, Aspergillusflavus antibiotic, asukamycin, aurantinin, an Aureolic acid antibiotic substance, aurodox, avilamycin, azidamfenicol, azidimycin, bacillaene, a Bacillus larvae antibiotic, bactobolin, benanomycin, benzanthrin, benzylmonate, bicozamycin, bravomicin, brodimoprim, butalactin, calcimycin, calvatic acid, candiplanecin, carumonam, carzinophilin, celesticetin, cepacin, cerulenin, cervinomycin, chartreusin, chloramphenicol, chloramphenicol palmitate, chloramphenicol succinate sodium, chlorflavonin, chlorobiocin, chlorocarcin, chromomycin, ciclopirox, ciclopirox olamine, citreamicin, cladosporin, clazamycin, clecarmycin, clindamycin, coliformin, collinomycin, copiamycin, corallopyronin, corynecandin, coumermycin, culpin, cuprimyxin, cyclamidomycin, cycloheximide, dactylomycin, danomycin, danubomycin, delaminomycin, demethoxyrapamycin, demethylscytophycin, dermadin, desdamethine, dexylosyl-benanomycin, pseudoaglycone, dihydromocimycin, dihydronancimycin, diumycin, dnacin, dorrigocin, dynemycin, dynemycin triacetate, ecteinascidin, efrotomycin, endomycin, ensanchomycin, equisetin, ericamycin, esperamicin, ethylmonate, everninomicin, feldamycin, flambamycin, flavensomycin, florfenicol, fluvomycin, fosfomycin, fosfonochlorin, fredericamycin, frenolicin, fumagillin, fumifungin, funginon, fusacandin, fusafungin, gelbecidine, glidobactin, grahamimycin, granaticin, griseofulvin, griseoviridin, grisonomycin, hayumicin, hayumicin, hazymicin, hedamycin, heneicomycin, heptelicid acid, holomycin, humidin, isohematinic acid, karnatakin, kazusamycin, kristenin, L-dihydrophenylalanine, a L-isoleucyl-L-2-amino-4-(4′-amino-2′,5′-cyclohexadienyl) derivative, lanomycin, leinamycin, leptomycin, libanomycin, lincomycin, lomofungin, lysolipin, magnesidin, manumycin, melanomycin, methoxycarbonylmethylmonate, methoxycarbonylethylmonate, methoxycarbonylphenylmonate, methyl pseudomonate, methylmonate, microcin, mitomalcin, mocimycin, moenomycin, monoacetyl cladosporin, monomethyl cladosporin, mupirocin, mupirocin calcium, mycobacidin, myriocin, myxopyronin, pseudoaglycone, nanaomycin, nancimycin, nargenicin, neocarcinostatin, neoenactin, neothramycin, nifurtoinol, nocardicin, nogalamycin, novobiocin, octylmonate, olivomycin, orthosomycin, oudemansin, oxirapentyn, oxoglaucine methiodide, pactacin, pactamycin, papulacandin, paulomycin, phaeoramularia fungicide, phenelfamycin, phenyl, cerulenin, phenylmonate, pholipomycin, pirlimycin, pleuromutilin, a polylactone derivative, polynitroxin, polyoxin, porfiromycin, pradimicin, prenomycin, prop-2-enylmonate, protomycin, Pseudomonas antibiotic, pseudomonic acid, purpuromycin, pyrinodemin, pyrrolnitrin, pyrrolomycin, amino, chloro pentenedioic acid, rapamycin, rebeccamycin, resistomycin, reuterin, reveromycin, rhizocticin, roridin, rubiflavin, naphthyridinomycin, saframycin, saphenamycin, sarkomycin, sarkomycin, sclopularin, selenomycin, siccanin, spartanamicin, spectinomycin, spongistatin, stravidin, streptolydigin, Streptomyces arenae antibiotic complex, streptonigrin, streptothricins, streptovitacin, streptozotocine, a strobilurin derivative, stubomycin, sulfamethoxazol-trimethoprim, sakamycin, tejeramycin, terpentecin, tetrocarcin, thermorubin, thermozymocidin, thiamphenicol, thioaurin, thiolutin, thiomarinol, thiomarinol, tirandamycin, tolytoxin, trichodermin, trienomycin, trimethoprim, trioxacarcin, tyrissamycin, umbrinomycin, unphenelfamycin, urauchimycin, usnic acid, uredolysin, variotin, vermisporin, verrucarin and analogs, salts and derivatives thereof.

[1509] In one or more embodiments, the antibiotic agent is a naturally occurring antibiotic compound. As used herein, the term “naturally-occurring antibiotic agent” includes all antibiotics that are obtained, derived or extracted from plant or vertebrate sources. Non-limiting examples of families of naturally-occurring antibiotic agents include phenol, resorcinol, antibiotic aminoglycosides, anamycin, quinines, anthraquinones, antibiotic glycopeptides, azoles, macrolides, avilamycin, agropyrene, cnicin, aucubin antibioticsaponin fractions, berberine (isoquinoline alkaloid), arctiopicrin (sesquiterpene lactone), lupulone, humulone (bitter acids), allicin, hyperforin, echinacoside, coniosetin, tetramic acid, imanine and novoimanine.

[1510] Ciclopirox and ciclopiroxolamine possess fungicidal, fungistatic and sporicidal activity. They are active against a broad spectrum of dermatophytes, yeasts, moulds and other fungi, such as Trichophytons species, Microsporum species, Epidermophyton species and yeasts (Candida albicans, Candida glabrata, other candida species and Cryptococcus neoformans). Some Aspergillus species are sensitive to ciclopirox as are some Penicillium. Likewise, ciclopirox is effective against many Gram-positive and Gram-negative bacteria (e.g., Escherichia coli, Proteus mirabilis, Pseudomonas aeruginosa, Staphylococcus and Streptococcus species), as well as Mycoplasma species, Trichomonas vaginalis and Actinomyces.

[1511] Plant oils and extracts which contain antibiotic agents are also useful. Non-limiting examples of plants that contain agents include thyme, Perilla, lavender, tea tree, Terfezia clayeryi, Micromonospora, Putterlickia verrucosa, Putterlickia pyracantha, Putterlickia retrospinosa, Maytenus ilicifolia, Maytenus evonymoides, Maytenus aquifolia, Faenia interjecta, Cordyceps sinensis, couchgrass, holy thistle, plantain, burdock, hops, echinacea, buchu, chaparral, myrrh, red clover and yellow dock, garlic, and St. John's wort. Mixtures of the antibiotic agents as described herein may also be employed.

### Combination Detection:

[1512] Any combination of the analytes disclosed herein can be detected using any of the methods described herein. In particular, any combination disclosed herein can be detected using any of the methods described herein.

[1513] A “photosensitizer” as used herein refers to a sensitizer for generation of singlet oxygen usually by excitation with light. Exemplary photosensitizers suitable for use include those described in U.S. Pat. Nos. 6,251,581, 5,516,636, 8,907,081, 6,545,012, 6,331,530, 8,247,180, 5,763,602, 5,705,622, 5,516,636, 7,217,531, and U.S. Patent Publication No. 2007/0059316, all of which are herein expressly incorporated by reference in their entireties. The photosensitizer can be photoactivatable (e.g., dyes and aromatic compounds) or chemiactivated (e.g., enzymes and metal salts). When excited by light the photosensitizer is usually a compound comprised of covalently bonded atoms, usually with multiple conjugated double or triple bonds. The compound should absorb light in the wavelength range of 200-1100 nm, usually 300-1000 nm, e.g., 450-950 nm, with an extinction coefficient at its absorbance maximum greater than 500 M⁻¹ cm⁻¹, e.g., at least 5000 M⁻¹ cm⁻¹, or at least 50,000 M⁻¹ cm⁻¹ at the excitation wavelength. The lifetime of an excited state produced following absorption of light in the absence of oxygen will usually be at least 100 nsec, e.g., at least 1 sec. In general, the lifetime must be sufficiently long to permit energy transfer to oxygen, which will normally be present at concentrations in the range of 10⁻⁵ to 10^{31 3}M depending on the medium. The sensitizer excited state will usually have a different spin quantum number (S) than its ground state and will usually be a triplet (S=1) when, as is usually the case, the ground state is a singlet (S═O). In some embodiments, the sensitizer will have a high intersystem crossing yield. That is, photoexcitation of a sensitizer will produce the long lived state (usually triplet) with an efficiency of at least 10%, at least 40%, e.g., greater than 80%. The photosensitizer will usually be at most weakly fluorescent under the assay conditions (quantum yield usually less that 0.5, or less that 0.1).

[1514] Photosensitizers that are to be excited by light will be relatively photostable and will not react efficiently with singlet oxygen. Several structural features are present in most useful sensitizers. Most sensitizers have at least one and frequently three or more conjugated double or triple bonds held in a rigid, frequently aromatic structure. They will frequently contain at least one group that accelerates intersystem crossing such as a carbonyl or imine group or a heavy atom selected from rows 3-6 of the periodic table, especially iodine or bromine, or they may have extended aromatic structures. Typical sensitizers include acetone, benzophenone, 9-thioxanthone, eosin, 9,10-dibromoanthracene, methylene blue, metallo-porphyrins, such as hematoporphyrin, phthalocyanines, chlorophylls, rose bengal, buckminsterfullerene, etc., and derivatives of these compounds having substituents of 1 to 50 atoms for rendering such compounds more lipophilic or more hydrophilic and/or as attaching groups for attachment. Examples of other photosensitizers that may be utilized are those that have the above properties and are enumerated in N. J. Turro, “Molecular Photochemistry,” page 132, W. A. Benjamin Inc., N.Y. 1965.

[1515] In some embodiments, the photosensitizers are relatively non-polar to assure dissolution into a lipophilic member when the photosensitizer is incorporated in an oil droplet, liposome, latex particle, etc.

[1516] In some embodiments, the photosensitizers suitable for use herein include other substances and compositions that can produce singlet oxygen with or without activation by an external light source. Thus, for example, molybdate (MoO₄⁼) salts and chloroperoxidase and myeloperoxidase plus bromide or chloride ion (Kanofsky, J. Biol. Chem. (1983) 259 5596) have been shown to catalyze the conversion of hydrogen peroxide to singlet oxygen and water. Either of these compositions can, for example, be included in particles and used in the assay method wherein hydrogen peroxide is included as an ancillary reagebly, chloroperoxidase is bound to a surface and molybdate is incorporated in the aqueous phase of a liposome. Also included within the scope of the invention as photosensitizers are compounds that are not true sensitizers but which on excitation by heat, light, or chemical activation will release a molecule of singlet oxygen. The best known members of this class of compounds includes the endoperoxides such as 1,4-biscarboxyethyl-1,4-naphthalene endoperoxide, 9,10-diphenylanthracene-9,10-endoperoxide and 5,6,11,12-tetraphenyl naphthalene 5,12-endoperoxide. Heating or direct absorption of light by these compounds releases singlet oxygen.

[1517] A “chemiluminescent compound” as used herein refers to a substance that undergoes a chemical reaction with singlet oxygen to form a metastable intermediate that can decompose with the simultaneous or subsequent emission of light within the wavelength range of 250 to 1200 nm. Exemplary chemiluminescent compounds suitable for use include those described in U.S. Pat. Nos. 6,251,581 and 7,709,273, and Patent Cooperatio Treaty (PCT) International Application Publication No. WO1999/042838. Examplery chemiluminescent compound includes the following:

| | | | Emission |
|---|---|---|---|
| Chemiluminescer | Half-Life | | Max |
| Thioxene + Diphenyl anthracence: | 0.6 | seconds | 430 nm |
| Thioxene + Umbelliferone derivative | 0.6 | seconds | 500 nm |
| Thioxene + Europium chelate | 0.6 | seconds | 615 nm |
| Thioxene + Samarium Chelate | 0.6 | seconds | 648 nm |
| Thioxene + terbium Chelate | 0.6 | seconds | 540 nm |
| N-Phenyl Oxazine + Umbelliferone | 30 | seconds | 500 nm |
| derivative | | | |
| N-Phenyl Oxazine + Europium chelate | 30 | seconds | 613 nm |
| N-phenyl Oxazine + Samarium Chelate | 30 | seconds | 648 nm |
| N-phenyl Oxazine + terbium Chelate | 30 | seconds | 540 nm |
| Dioxene + Umbelliferone derivative | 300 | seconds | 500 nm |
| Dioxene + Europium chelate | 300 | seconds | 613 nm |
| Dioxene + Samarium Chelate | 300 | seconds | 648 nm |
| N-phenyl Oxazine + terbium Chelate | 300 | seconds | 540 nm |

[1518] All of the above mentioned applications are hereby expressly incorporated by reference herein in their entireties. Emission will usually occur without the presence of an energy acceptor or catalyst to cause decomposition and light emission. In some embodiments, the intermediate decomposes spontaneously without heating or addition of ancillary reagents following its formation. However, addition of a reagent after formation of the intermediate or the use of elevated temperature to accelerate decomposition will be required for some chemiluminescent compounds. The chemiluminescent compounds are usually electron rich compounds that react with singlet oxygen, frequently with formation of dioxetanes or dioxetanones. Exemplary of such compounds are enol ethers, enamines, 9-alkylidenexanthans, 9-alkylidene-N-alkylacridans, aryl vinyl ethers, dioxenes, arylimidazoles and lucigenin. Other chemiluminescent compounds give intermediates upon reaction with singlet oxygen, which subsequently react with another reagent with light emission. Exemplary compounds are hydrazides such as luminol and oxalate esters.

[1519] The chemiluminescent compounds of interest will generally emit at wavelengths above 300 nanometers and usually above 400 nm. Compounds that alone or together with a fluorescent molecule emit light at wavelengths beyond the region where serum components absorb light will be of particular use. The fluorescence of serum drops off rapidly above 500 nm and becomes relatively unimportant above 550 nm. Therefore, when the analyte is in serum, chemiluminescent compounds that emit light above 550 nm, e.g., above 600 nm may be suitable for use. In order to avoid autosensitization of the chemiluminescent compound, in some embodiments, the chemiluminescent compounds do not absorb light used to excite the photosensitizer. In some embodiments, the sensitizer is excited with light wavelengths longer than 500 nm, it will therefore be desirable that light absorption by the chemiluminescent compound be very low above 500 nm.

[1520] Where long wave length emission from the chemiluminescent compound is desired, a long wavelength emitter such as a pyrene, bound to the chemiluminescent compound can be used. Alternatively, a fluorescent molecule can be included in the medium containing the chemiluminescent compound. In some embodiments, fluorescent molecules will be excited by the activated chemiluminescent compound and emit at a wavelength longer than the emission wavelength of the chemiluminescent compound, usually greater that 550 nm. It is usually also desirable that the fluorescent molecules do not absorb at the wavelengths of light used to activate the photosensitizer. Examples of useful dyes include rhodamine, ethidium, dansyl, Eu(fod)₃, Eu(TTA)₃, Ru(bpy)₃⁺⁺ (wherein bpy=2,2′-dipyridyl, etc. In general these dyes act as acceptors in energy transfer processes and in some embodiments, have high fluorescent quantum yields and do not react rapidly with singlet oxygen. They can be incorporated into particles simultaneously with the incorporation of the chemiluminescent compound into the particles.

[1521] In some embodiments, the disclosure provides diffractive optics detection technology that can be used with, for example, ingestible device technology. In certain embodiments, an ingestible device includes the diffractive optics technology (e.g., diffractive optics detection system). In certain embodiments, the disclosure provides diffractive optics technology (e.g., diffractive optics detection systems) that are used outside the body of subject. As an example, an ingestible device can be used to obtain one more samples in the body (e.g., in the gastrointestinal tract) of a subject, and the diffractive optics technology can be used to analyze the sample(s). Such analysis can be performed in vivo (e.g., when the ingestible device contains the diffractive optics).

[1522] Diffraction is a phenomenon that occurs due to the wave nature of light. When light hits an edge or passes through a small aperture, it is scattered in different directions. But light waves can interfere to add (constructively) and subtract (destructively) from each other, so that if light hits a non-random pattern of obstacles, the subsequent constructive and destructive interference will result in a clear and distinct diffraction pattern. A specific example is that of a diffraction grating, which is of uniformly spaced lines, typically prepared by ruling straight, parallel grooves on a surface. Light incident on such a surface produces a pattern of evenly spaced spots of high light intensity. This is called Bragg scattering, and the distance between spots (or ‘Bragg scattering peaks’) is a unique function of the diffraction pattern and the wavelength of the light source. Diffraction gratings, like focusing optics, can be operated in both transmission and reflection modes.

[1523] In general, the light used in the diffractive optics can be of any appropriate wavelength. Exemplary wavelengths include visible light, infrared red (IR) and ultraviolet (UV). Optionally, the light can be monochromatic or polychromatic. The light can be coherent or incoherent. The light can be collimated or non-collimated. In some embodiments, the light is coherent and collimated. Generally, any appropriate light source may be used, such as, for example, a laser (e.g., a laser diode) or a light emitting diode. In some embodiments, the light source is a laser diode operating at 670 nm wavelength, e.g., at 3 mWatts power. Optionally, an operating wavelength of a laser diode can be 780 nm, e.g., when larger grating periods are used. In certain embodiments, the light source is a laser, such as, for example, a He—Ne laser, a Nd:YVO4 laser, or an argon-ion laser. In some embodiments, the light source is a low power, continuous waver laser.

[1524] The diffracted light can be detected using any appropriate light detector(s). Examples of light detectors include photodetectors, such as, for example, position sensitive photodiodes, photomultiplier tubes (PMTs), photodiodes (PDs), avalanche photodiodes (APDs), charged-coupled device (CCD) arrays, and CMOS detectors. In some embodiments, the diffracted light is detected via one or more individual photodiodes.

[1525] In general, the diffraction grating is made of a material that is transparent in the wavelength of the radiation used to illuminate the sensor. Any appropriate material may be used for the diffraction grating substrate, such as glass or a polymer. Exemplary polymers include polystyrene polymers (PSEs), cyclo-olefin polymers (COPs), polycarbonate polymers, polymethyl methacrylates, and methyl methacrylate styrene copolymers. Exemplary COPs include Zeonex (e.g., Zeonex E48R, Zeonex F52R).

[1526] The light may be incident on the diffraction grating any appropriate angle. In some embodiments, the light is incident on the diffraction grating with an angle of incidence of from 30° to 80° (e.g., from 40° to 80°, from 50° to 70°, from 55 to 65°, 60°). Optionally, the system is configured so that that diffractive grating and light source can move relative to each other

[1527] In general, the light detector can be positioned with respect to the diffractive grating so that the diffraction grating can be illuminated at a desired angle of incidence and/or so that diffracted light can be detected at a desired angle and/or so that diffracted light of a desired order can be detected.

[1528] The period P of the diffraction grating can be selected as desired. In some embodiments, the period P is from 0.5 microns to 50 microns (e.g., from one micron to 15 microns, from one micron to five microns). In some embodiments, the grating is a repeating patter of 1.5 micron and 4.5 micron lines with a period of 15 microns.

[1529] The height h of the diffraction grating can be selected as desired. In certain embodiments, the height h is from one nanometer to about 1000 nanometers (e.g., from about five nanometers to about 250 nanometers, from five nanometers to 100 nanometers).

[1530] In general, the diffractive optics can be prepared using any appropriate method, such as, for example, surface ablation, photolithograph (e.g., UV photolithography), laser etching, electron beam etching, nano-imprint molding, or microcontact printing.

[1531] Optionally, the diffractive optics system can include one or more additional optical elements, such as, for example, one or more mirrors, filters and/or lenses. Such optical elements can, for example, be arranged between the light source and the diffractive grating and/or between the diffractive grating and the detector.

[1532] In some of the embodiments of the devices described herein, a primary binding partner specifically binds to a secondary binding partner through non-covalent interactions (e.g., electrostatic, van der Waals, hydrophobic effect). In some embodiments, a primary binding partner specifically binds to a secondary binding partner via a covalent bond (e.g., a polar covalent bond or a non-polar covalent bond). In some embodiments of any of the devices described herein, the primary and the secondary binding partner can be interchanged. For example, the primary binding partner can be biotin, or a derivative thereof, and the secondary binding partner is avidin, or a derivative thereof. In other examples, the primary binding partner can be avidin, or a derivative thereof, and the secondary binding partner is biotin.

[1533] In some embodiments, the binding of the primary and the secondary binding partner is essentially irreversible. In some embodiments, the binding of the primary and the secondary binding partner is reversible. In some embodiments, the primary binding partner is CaptAvidin™ biotin-binding protein and the secondary binding partner is biotin, or vice versa. In some embodiments, the primary binding partner is DSB-X™ biotin and the secondary binding partner is avidin, or vice versa. In some embodiments, the primary binding partner is desthiobiotin and the secondary binding partner is avidin, or vice versa (Hirsch et al., Anal Biochem. 308(2):343-357, 2002). In some embodiments, the primary binding partner is glutathione (GSH) or a derivative thereof, and the secondary binding partner is glutathione-S-transferase (GST).

[1534] In some embodiments, the primary binding partner can bind to a target analyte that is a nucleic acid (e.g., a DNA molecule, a RNA molecule). In some embodiments, the primary binding partner comprises a portion of a nucleic acid that is complementary to the nucleic acid sequence of the target analyte.

[1535] In some embodiments of any of the devices described herein, the device can include a label that binds to the target analyte and does not prevent binding of the target analyte to the primary binding partner. In some embodiments, the label can amplify the diffraction signal of the target analyte.

[1536] In some embodiments, the label is from about 1 nm to 200 nm (e.g., about 50 nm to about 200 nm).

[1537] In some embodiments, the label (e.g., any of the labels described herein) includes one or more antibodies (e.g., any of the antibodies and/or antibody fragments described herein).

[1538] In some embodiments, the label is a nanoparticle (e.g., a gold nanoparticle) that includes the primary binding partner that has a nucleic acid sequence that is complementary to the target analyte, and is covalently linked to the nanoparticle.

[1539] One or more additional steps can be performed in any of the methods described herein. In some embodiments, the one or more additional steps are performed: prior to the binding of the primary binding partner to the secondary binding partner, after the binding of the primary binding partner to the secondary binding partner, prior to the binding of the primary binding partner to the target analyte, or after the binding of the primary binding partner to the target analyte.

[1540] In some embodiments of any of the methods described herein, the determining step (during which the primary binding partner binds to the target analyte is detected) can occur in at least 15 seconds. In some embodiments, the binding of the primary binding partner to the target analyte can occur during a period of time of, for example, five at least seconds.

[1541] In some embodiments, the one or more additional steps can include: a blocking of the sensors step, at least one wash step, a capturing step, and/or a filtering step. In some embodiments, the blocking step can include blocking a sensor within the ingestible device with a solution comprising at least 1% bovine serum albumin (BSA) in a buffered solution (e.g., phosphate buffered saline (PBS), Tris buffered saline (TBS)). In some embodiments, the at least one wash step can include washing with a buffered solution (e.g., phosphate buffered saline (PBS), Tris buffered saline (TBS)). In general, blocking is performed during capsule manufacture, rather than in vivo.

[1542] In some embodiments, the capturing step includes enriching the target analyte. In some embodiments, the capturing step includes physically separating the target analyte from the remaining sample using a filter, a pore, or a magnetic bead. In some embodiments, the target analyte is captured by size exclusion.

[1543] In some embodiments, the disclosure provides methods of obtaining, culturing, and/or detecting target cells and/or target analytes in vivo within the gastrointestinal (GI) tract or reproductive tract of a subject. Associated devices are also disclosed. The methods and devices described provide a number of advantages for obtaining and/or analyzing fluid samples from a subject. In some embodiments, diluting the fluid sample increases the dynamic range of analyte detection and/or reduces background signals or interference within the sample. For example, interference may be caused by the presence of non-target analytes or non-specific binding of a dye or label within the sample. In some embodiments, culturing the sample increases the concentration of target cells and/or target analytes produced by the target cells thereby facilitating their detection and/or characterization.

[1544] In certain embodiments, the methods and devices a described herein may be used to obtain information regarding bacteria populations in the GI tract of a subject. This has a number of advantages and is less invasive than surgical procedures such as intubation or endoscopy to obtain fluid samples from the GI tract. The use of an ingestible device as described herein also allows for fluid samples to be obtained and data to be generated on bacterial populations from specific regions of the GI tract.

[1545] In some embodiments, the methods and devices described herein may be used to generate data such as by analyzing the fluid sample, dilutions thereof or cultured samples for one or more target cells and/or target analytes. The data may include, but is not limited to, the types of bacteria present in the fluid sample or the concentration of bacteria in specific regions of the GI tract. Such data may be used to determine whether a subject has an infection, such as Small Intestinal Bacterial Overgrowth (SIBO), or to characterize bacterial populations within the GI tract for diagnostic or other purposes. Thus, in some embodiments, analytes disclosed herein are indicative of disorders of the gastrointestinal tract associated with anomalous bacterial populations.

[1546] For example, in one aspect, the data may include, but is not limited to, the concentration of bacteria in a specific region of the GI tract that is one or more of the duodenum, jejunum, ileum, ascending colon, transverse colon or descending colon. In one aspect, the specific region of the GI tract is the duodenum. In one aspect, the specific region of the GI tract is the jejunum. In one aspect, the specific region of the GI tract is the ileum. In one aspect, the specific region of the GI tract is the ascending colon. In one aspect, the specific region of the GI tract is the transverse colon. In one aspect, the specific region of the GI tract is the descending colon. In a related embodiment, the data may be generated every one or more days to monitor disease flare-ups, or response to the therapeutic agents disclosed herein.

[1547] Data may be generated after the device has exited the subject, or the data may be generated in vivo and stored on the device and recovered ex vivo. Alternatively, the data can be transmitted wirelessly from the device while the device is passing through the GI tract of the subject or in place within the reproductive tract of the subject.

[1548] In some embodiments, a method comprises: providing a device comprising one or more dilution chambers and dilution fluid; transferring all or part of a fluid sample obtained from the GI tract or reproductive tract of the subject into the one or more dilution chambers in vivo; and combining the fluid sample and the dilution fluid to produce one or more diluted samples in the one or more dilution chambers.

[1549] In certain embodiments, a method comprises: providing an ingestible device comprising one or more dilution chambers; transferring all or part of a fluid sample obtained from the GI tract into the one or more dilution chambers comprising sterile media; culturing the sample in vivo within the one or more dilution chambers to produce one or more cultured samples; and detecting bacteria in the one or more cultured samples.

[1550] In some embodiments, a method comprises: providing a device comprising one or more dilution chambers; transferring all or part of a fluid sample obtained from the GI tract or reproductive tract into the one or more dilution chambers; combining all or part of the fluid sample with a dilution fluid in the one or more dilution chambers; and detecting the target analyte in the one or more diluted samples.

[1551] In certain embodiments, a device comprises: one or more dilution chambers for diluting a fluid sample obtained from the GI tract or reproductive tract; and dilution fluid for diluting the sample within the one or more dilution chambers.

[1552] In some embodiments, the device comprises: one or more dilution chambers for culturing a fluid sample obtained from the GI tract; sterile media for culturing the sample within the one or more dilution chambers; and a detection system for detecting bacteria.

[1553] In certain embodiments, a device comprises: one or more dilution chambers for culturing a fluid sample obtained from the GI tract; sterile media for culturing the sample within the one or more dilution chambers; and a detection system for detecting bacteria.

[1554] Also provided is the use of a device as described herein for diluting one or more samples obtained from the GI tract or reproductive tract of a subject. In one embodiment, there is provided the use of an ingestible device as described herein for detecting target cells and/or target analytes in vivo within the gastrointestinal (GI) tract of a subject.

[1555] Further provided is a system comprising a device as described herein and a base station. In one embodiment, the device transmits data to the base station, such as data indicative of the concentration and/or types of bacteria in the GI tract of the subject. In one embodiment, the device receives operating parameters from the base station. Some embodiments described herein provide an ingestible device for obtaining one or more samples from the GI tract or reproductive tract of a subject and diluting and/or culturing all or part of the one or more samples. The ingestible device includes a cylindrical rotatable element having a port on the wall of the cylindrical rotatable element. The ingestible device further includes a shell element wrapping around the cylindrical rotatable element to form a first dilution chamber between the cylindrical rotatable element and the shell element. The shell element has an aperture that exposes a portion of the wall of the cylindrical rotatable element to an exterior of the ingestible device.

[1556] In certain embodiments, the medical device comprises one or more dilution chambers for receiving a fluid sample from the GI tract or reproductive tract of a subject or a dilution thereof. In some embodiments, one or more dilutions of the fluid sample are cultured in one or more dilution chambers. In certain embodiments, the dilution chambers each define a known volume, optionally the same volume or different volumes. In some embodiments, the dilution chambers define a fluid volume ranging from about 10 μL to about 1 mL. The dilution chambers may define a fluid volume less than or equal to about 500 μL, less than or equal to about 250 μL, less than or equal to about 100 μL, or less than or equal to about 50 μL. In certain embodiments, the dilution chambers define a fluid volume of greater than or equal to about 10 μL, greater than or equal to about 20 μL, greater than or equal to about 30 μL, or greater than or equal to about 50 μL. In some embodiments, the dilution chambers define a fluid volume between about 10 μL and 500 μL, between about 20 μL and 250 μL, between about 30 μL and 100 μL or about 50 μL.

[1557] In some embodiments, dilution fluid in the device is combined with all or part of the fluid sample, or dilution thereof, to produce one or more dilutions. In certain embodiments, the dilution fluid is sterile media suitable for culturing one or more target cells within the dilution chambers.

[1558] In certain embodiments, the one or more dilution chambers may be filled with the dilution fluid prior to a patient ingesting the ingestible device. In some embodiments, the dilution fluid may be added into the one or more dilution chambers in vivo from a reservoir of the ingestible device. Sampling and dilution of the GI fluid sample may take place in vivo. For example, an actuator of the ingestible device may pump the dilution fluid from the reservoir into a dilution chamber when it is determined that the ingestible device is located at a predetermined location within the GI tract. In some embodiments, the dilution chambers each contain a volume of sterile media suitable for culturing a fluid sample from the GI tract or reproductive tract. In certain embodiments, the dilution chambers are at least 95%, at least 97%, at least 98%, or at least 99% full of sterile media. In some embodiments, the dilution chambers each contain oxygen to facilitate aerobic bacteria growth. In certain embodiments, a non-dilution chamber comprises oxygen and is added to one or more of the dilution chambers to facilitate aerobic bacteria growth.

[1559] In some embodiments, the culturing may take place in vivo immediately after the GI fluid sample has been diluted. Or alternatively, the culturing may take place ex vivo, e.g., when the ingestible device has been evacuated and recovered such that the dilution chamber containing the diluted GI fluid sample may be extracted and the culturing may be performed in a laboratory. The recovery of the ingestible device may be performed in a similar manner as embodiments described in U.S. Provisional Application No. 62/434,188, filed on Dec. 14, 2016, which is herein expressly incorporated by reference in its entirety.

[1560] As used herein “culturing” refers to maintaining target cells in an environment that allows a population of one or more target cells to increase in number through cell division. For example, in some embodiments, “culturing” may include combining the cells with media in an dilution chamber at a temperature that permits cell growth, optionally a temperature found in vivo within the GI tract or reproductive tract of a subject. In certain embodiments, the cells are cultured at a temperature between about 35° C. and 42° C.

[1561] As used herein “dilution fluid” refers to a fluid within the device for diluting a fluid sample from the GI tract or reproductive tract. In some embodiments, the dilution fluid is an aqueous solution. In certain embodiments, the dilution fluid comprises one or more agents that promote or inhibit the growth of an organism, such as a fungus or bacteria. In some embodiments, the dilution fluid comprises one or more agents that facilitate the detection of a target analyte, such as dyes or binding agents for target analytes.

[1562] In some embodiments, the dilution fluid is a sterile media. As used herein, “sterile media” refers to media that does not contain any viable bacteria or other cells that would grow and increase in number through cell division. Media may be rendered sterile by various techniques known in the art such as, but not limited to, autoclaving and/or preparing the media using asceptic techniques. In certain embodiments, the media is a liquid media. Examples of media suitable for culturing bacteria include nutrient broth, Lysogeny Broth (LB) (also known as Luria Broth), Wilkins chalgren, and Tryptic Soy Broth (TSB), Other growth or culture media known in the art may also be used in the methods and devices described herein. In some embodiments, the media has a carbon source, such as glucose or glycerol, a nitrogen source such as ammonium salts or nitrates or amino acids, as well as salts and/or trace elements and vitamins required for microbial growth. In certain embodiments, the media is suitable for maintaining eukaryotic cells. In some embodiments, the media comprises one or more agents that promote or inhibit the growth of bacteria, optionally agents that promote or inhibit the growth of specific types of bacteria.

[1563] In certain embodiments, the media is a selective media. As used herein, “selective media” refers to a media that allows certain types of target cells to grow and inhibits the growth of other organisms. Accordingly, the growth of cells in a selective media indicates the presence of certain types of cells within the cultured sample. For example, in some embodiments, the media is selective for gram-positive or gram-negative bacteria. In certain embodiments, the media contains crystal violet and bile salts (such as found in MacConkey agar) that inhibit the growth of gram-positive organisms and allows for the selection and isolation of gram-negative bacteria. In some embodiments, the media contains a high concentration of salt (NaCl) (such as found in Mannitol salt agar) and is selective for Gram-positive bacteria. In some embodiments, the media selectively kills eukaryotic cells or only grows prokaryotic cells, for example, using a media comprising Triton™ X-100. In certain embodiments, the media selectively kills prokaryotic cells (or alternatively only grows eukaryotic cells), for example, using a media that comprises antibiotics.

[1564] In some embodiments, the media is an indicator media. As used herein, “indicator media” refers to a media that contains specific nutrients or indicators (such as, but not limited to neutral red, phenol red, eosin γ, or methylene blue) that produce a detectable signal when a certain type of cells are cultured in the indicator media.

[1565] In some embodiments, the disclosure provides a composition comprising a dye and optionally a reagent for selective lysis of eukaryotic cells. In certain embodiments, the composition comprises both a dye and a reagent for selective lysis of eukaryotic cells. In some embodiments, the composition further comprises one or more reagents independently selected from the group consisting of: a second reagent for selective lysis of eukaryotic cells (e.g., Triton X-100), an electrolyte (e.g., MgCl₂), an anti-fungi reagent (e.g., amphotericin-B), and an antibiotic. In some embodiments, the composition comprises water and is in the form of an aqueous solution. In some embodiments, the composition is a solid or semi-solid. In some embodiments, the compositions described here are suitable for use in a kit or device for detecting or quantifying viable bacterial cells in a sample. In some embodiments, such a device is an ingestible device for detecting or quantifying viable bacterial cells in vivo (e.g., in the GI tract). In some embodiments, viable bacterial cells in a sample are detected or quantified in the presence of one or more antibiotics to determine antibiotic resistance of the bacteria in the sample. In some embodiments, anomalous bacterial populations in a sample may be detected or quantified, for example through the use of one a composition comprising a dye as disclosed herein, to determine whether a subject has an infection, such as Small Intestinal Bacterial Overgrowth (SIBO), or to characterize bacterial populations within the GI tract for diagnostic or other purposes.

[1566] In some embodiments, a method comprises: (a) contacting the sample with a composition as described herein; and (b) measuring total fluorescence or rate of change of fluorescence as a function of time of said sample, thereby detecting viable bacterial cells in said sample. In some embodiments, a control as described herein may be employed in the method. In some embodiments, the total fluorescence or the rate of change of fluorescence as a function of time of the sample is measured over multiple time points for an extended period of time in step (b), thereby detecting viable bacterial cells in said sample. In some embodiments, the method further comprises correlating the total fluorescence or the rate of change of fluorescence as a function of time determined in step (b) to the number of viable bacterial cells in the sample. In some embodiments, the rate of change of fluorescence as a function of time of the sample measured over multiple time points is determined and compared to the rate of change of fluorescence as a function of time of a control measured over the same time points to determine the number of viable bacterial cells in the sample. In some embodiments, the method does not require ex vivo plating or culturing. In some embodiments, the method does not require aspiration. In some embodiments, the method is performed in vivo (e.g., in an ingestible device in vivo). In some embodiments, the method comprises communicating the results of the onboard assay(s) to an ex vivo receiver.

[1567] In certain embodiments, a kit comprises a composition as described herein and instructions, e.g., for detecting or quantifying viable bacterial cells in a sample. In some embodiments, a device comprises a composition as described herein, e.g., for detecting or quantifying viable bacterial cells in a sample. The detection of live cells, as opposed to the detection of bacterial components (such as endotoxins) which can be present in the sample environment and lead to conflicting results, is the gold standard of viable plate counting and represents one of the advantages of the compositions and methods described herein.

[1568] The systems employ methods, compositions and detection systems found to accurately and reliably correlate fluorescence to total bacteria count (TBC) in an autonomous, ingestible device, or other similarly-sized device. The compositions include novel combinations of dyes, buffers and detergents that allow for the selective staining of viable bacterial cells in samples that comprise non-bacterial cells and other components that otherwise make detecting or quantifying live bacterial cells challenging. In some embodiments, the systems allow for bacteria to be quantified in near real-time and the results to be shared telemetrically outside of the device.

[1569] In certain embodiments, the disclosure provides a method of assessing or monitoring the need to treat a subject suffering from or at risk of overgrowth of bacterial cells in the gastrointestinal tract, which comprises: (a) obtaining a sample from the gastrointestinal tract of said subject; (b) contacting the sample with a composition as described herein; (c) measuring total fluorescence or rate of change of fluorescence as a function of time of said sample; and (d) correlating the total fluorescence or the rate of change of fluorescence as a function of time measured in step (c) to the number of viable bacterial cells in the sample, wherein the number of the viable bacterial cells determined in step (e) greater than about 105 CFU/mL indicates a need for treatment, e.g., with an antibiotic agent as described herein. In some embodiments, a control as described herein may be employed in the method. In some embodiments, the total fluorescence or the rate of change of fluorescence as a function of time of the sample is measured over multiple time points for an extended period of time in step (c). In some embodiments, the rate of change of fluorescence as a function of time of the sample measured over multiple time points is determined and compared to the rate of change of fluorescence as a function of time of a control measured over the same time points to determine the number of viable bacterial cells in the sample. In some embodiments, the method does not require ex vivo plating or culturing. In some embodiments, the method does not require aspiration. In some embodiments, the method is performed in vivo (e.g., in an ingestible device in vivo). In some embodiments, the method comprises communicating the results of the onboard assay(s) to an ex vivo receiver. In some embodiments, the method may be further used to monitor the subject after the treatment (e.g., with an antibiotic). In some embodiments, the method may be used to assess the efficacy of the treatment. For example, efficacious treatment may be indicated by the decrease of the number of viable bacterial cells in a sample from the GI tract of the subject post-treatment. Efficacy of the treatment may be evaluated by the rate of decrease of the number of viable bacterial cells in a sample from the GI tract of the subject post-treatment. In some embodiments, the method may be used to detect infection with antibiotic-resistant strains of bacteria in a subject. For instance, such infection may be indicated where the number of viable bacterial cells in a sample from the GI tract of the subject does not substantially decrease after antibiotic treatment.

[1570] In some embodiments, the disclosure provides an absorbable material, (e.g., absorbable sponge), having absorbed therein a composition as described herein. In some embodiments, the absorbable sponge is Ahlstrom Grade 6613H (Lot 150191) or Porex PSU-567, having absorbed therein a composition as described herein. In some embodiments, the absorbable sponge may be prepared by injecting into the absorbable sponge an aqueous solution comprising a composition as described herein, and optionally further comprising a step of drying the resulting absorbable sponge.

[1571] In certain embodiments, the disclosure provides a method for detecting the presence of viable bacterial cells in a sample, which comprises: (a) fully or partially saturating an absorbable sponge as described herein, or an absorbable sponge prepared as described herein, with the sample; and (b) measuring total fluorescence or rate of change of fluorescence as a function of time of the fully or partially saturated sponge prepared in step (a), thereby detecting viable bacterial cells. In some embodiments, a control as described herein may be employed in the method. In some embodiments, the total fluorescence or the rate of change of fluorescence as a function of time of the fully or partially saturated sponge is measured over multiple time points for an extended period of time in step (b), thereby detecting viable bacterial cells in said sample. In some embodiments, the method further comprises correlating the total fluorescence or the rate of change of fluorescence as a function of time measured in step (b) to the number of viable bacterial cells in the sample. In some embodiments, the rate of change of fluorescence as a function of time of the fully or partially saturated sponge measured over multiple time points is determined and compared to the rate of change of fluorescence as a function of time of a control measured over the same time points to determine the number of viable bacterial cells in the sample. In some embodiments, the method does not require ex vivo plating or culturing. In some embodiments, the method does not require aspiration. In some embodiments, the method is performed in vivo (e.g., in an ingestible device in vivo). In some embodiments, the method comprises communicating the results of the onboard assay(s) to an ex vivo receiver.

In one aspect, provided herein is a kit comprising an absorbable sponge as described herein and instructions, e.g., for detecting or quantifying viable bacterial cells in a sample. In another aspect, provided herein is a device comprising an absorbable sponge as described herein, e.g., for detecting or quantifying viable bacterial cells in a sample.

[1572] In certain embodiments, the disclosure provides a method of assessing or monitoring the need to treat a subject suffering from or at risk of overgrowth of bacterial cells in the gastrointestinal tract, which comprises: (a) obtaining a sample from the gastrointestinal tract of said subject; (b) fully or partially saturating an absorbable sponge described herein, or an absorbable sponge prepared as described herein, with the sample; (c) measuring total fluorescence or rate of change of fluorescence as a function of time of the fully or partially saturated sponge prepared in step (b); (d) correlating the total fluorescence or the rate of change of fluorescence as a function of time measured in step (c) to the number of viable bacterial cells in the sample, wherein the number of the viable bacterial cells as determined in step (e) greater than about 10⁵ CFU/mL indicates a need for treatment, e.g., with an antibiotic agent as described herein. In some embodiments, a control as described herein may be employed in the method. In some embodiments, the total fluorescence or the rate of change of fluorescence as a function of time of the fully or partially saturated sponge is measured over multiple time points for an extended period of time in step (c). In some embodiments, the rate of change of fluorescence as a function of time of the fully or partially saturated sponge measured over multiple time points is determined and compared to the rate of change of fluorescence as a function of time of a control measured over the same time points to determine the number of viable bacterial cells in the sample. In some embodiments, the method does not require ex vivo plating or culturing. In some embodiments, the method does not require aspiration. In some embodiments, the method is performed in vivo (e.g., in an ingestible device in vivo). In some embodiments, the method comprises communicating the results of the onboard assay(s) to an ex vivo receiver. In some embodiments, the method may be further used to monitor the subject after the treatment (e.g., with an antibiotic). In some embodiments, the method may be used to assess the efficacy of the treatment. For example, efficacious treatment may be indicated by the decrease of the number of viable bacterial cells in a sample from the GI tract of the subject post-treatment. Efficacy of the treatment may be evaluated by the rate of decrease of the number of viable bacterial cells in a sample from the GI tract of the subject post-treatment. In some embodiments, the method may be used to detect infection with antibiotic-resistant strains of bacteria in a subject. For instance, such infection may be indicated where the number of viable bacterial cells in a sample from the GI tract of the subject does not substantially decrease after antibiotic treatment

[1573] In certain embodiments, the disclosure provides and ingestible device comprising a housing; a first opening in the wall of the housing; a second opening in the first end of the housing; and a chamber connecting the first opening and the second opening, wherein at least a portion of the chamber forms a sampling chamber within the ingestible device. In some embodiments, the sampling chamber is configured to hold an absorbable sponge described herein. In some embodiments, the sampling chamber is configured to hold a sample obtained from a gastrointestinal (GI) tract of a body. In some embodiments, the ingestible device is individually calibrated (for example, by comparing to a positive or negative control as described herein), wherein the fluorescent properties of the absorbable sponge held in the sampling chamber of the device are determined prior to the introduction of the sample. The ingestible device as described herein is useful for detecting or quantifying viable bacterial cells in vivo. In some embodiments, provided herein is a method for detecting or quantifying viable bacterial cells in a GI tract sample in vivo using an ingestible device as described herein. In some embodiments, provided herein is a method of assessing or monitoring the need to treat a subject suffering from or at risk of overgrowth of bacterial cells in the GI tract in vivo using an ingestible device as described herein. In some embodiments, provided herein is a method of altering the treatment regimen of a subject suffering from or at risk of overgrowth of bacterial cells in the GI tract in vivo using an ingestible device as described herein. In one aspect, the subject is a subject suffering from or at risk of overgrowth of bacterial cells in the duodenum. In one aspect, the subject is a subject suffering from or at risk of overgrowth of bacterial cells in the jejunum. In one aspect, the subject is a subject suffering from or at risk of overgrowth of bacterial cells in the ileum. In one aspect, the subject is a subject suffering from or at risk of overgrowth of bacterial cells in the ascending colon. In one aspect, the subject is a subject suffering from or at risk of overgrowth of bacterial cells in the transverse colon. In one aspect, the subject is a subject suffering from or at risk of overgrowth of bacterial cells in the descending colon. In some embodiments, the method may be further used to monitor the subject after the treatment (e.g., with an antibiotic). In some embodiments, the method may be used to assess the efficacy of the treatment. For example, efficacious treatment may be indicated by the decrease of the number of viable bacterial cells in a sample from the GI tract of the subject post-treatment. Efficacy of the treatment may be evaluated by the rate of decrease of the number of viable bacterial cells in a sample from the GI tract of the subject post-treatment. In some embodiments, the method may be used to detect infection with antibiotic-resistant strains of bacteria in a subject. For instance, such infection may be indicated where the number of viable bacterial cells in a sample from the GI tract of the subject does not substantially decrease after antibiotic treatment. In some embodiments, the method is performed autonomously and does not require instructions, triggers or other inputs from outside the body after the device has been ingested.

[1574] “Eukaryotic” as recited herein relates to any type of eukaryotic organism excluding fungi, such as animals, in particular animals containing blood, and comprises invertebrate animals such as crustaceans and vertebrates. Vertebrates comprise both cold-blooded (fish, reptiles, amphibians) and warm blooded animal (birds and mammals). Mammals comprise in particular primates and more particularly humans

[1575] “Selective lysis” as used herein is obtained in a sample when the percentage of bacterial cells in that sample that remain intact is significantly higher (e.g. 2, 5, 10, 20, 50, 100, 250, 500, or 1,000 times more) than the percentage of the eukaryotic cells in that sample that remain intact, upon treatment of or contact with a composition or device as described herein.

[1576] In some embodiments, the dye suitable for use herein is a dye that is capable of being internalized by a viable cell, binding to or reacting with a target component of the viable cell, and having fluorescence properties that are measurably altered when the dye is bound to or reacted with the target component of the viable cell. In some embodiments, the dye herein is actively internalized by penetrating viable cells through a process other than passible diffusion across cell membranes. Such internalization includes, but is not limited to, internalization through cell receptors on cell surfaces or through channels in cell membranes. In some embodiments, the target component of a viable cell to which the dye is bound to or reacted with is selected from the group consisting of: nucleic acids, actin, tubulin, enzymes, nucleotide-binding proteins, ion-transport proteins, mitochondria, cytoplasmic components, and membrane components. In some embodiments, the dye suitable for use herein is a fluorogenic dye that is capable of being internalized and metabolized by a viable cell, and wherein said dye fluoresces when metabolized by the viable cell. In some embodiments, the dye is a chemiluminescent dye that is capable of being internalized and metabolized by a viable cell, and wherein said dye becomes chemiluminescent when metabolized by the viable cell.

[1577] In some embodiments, the composition comprises a dye that fluoresces when bond to nucleic acids. Examples of such dyes include, but are not limited to, acridine orange (U.S. Pat. No. 4,190,328); calcein-AM (U.S. Pat. No. 5,314,805); DAPI; Hoechst 33342; Hoechst 33258; PicoGreen™; SYTO® 16; SYBR® Green I; Texas Red®; Redmond Red™; Bodipy® Dyes; Oregon Green™; ethidium bromide; and propidium iodide.

[1578] In some embodiments, the composition comprises a lipophilic dye that fluoresces when metabolized by a cell. In some embodiments, the dye fluoresces when reduced by a cell or a cell component. Examples of dyes that fluoresce when reduced include, but are not limited to, resazurin; C¹²-resazurin; 7-hydroxy-9H-(1,3 dichloro-9,9-dimethylacridin-2-ol)N-oxide; 6-chloro-9-nitro-5-oxo-5H-benzo[a]phenoxazine; and tetrazolium salts. In some embodiment, the dye fluoresces when oxidized by a cell or a cell component. Examples of such dyes include, but are not limited to, dihydrocalcein AM; dihydrorhodamine 123; dihydroethidium; 2,3,4,5,6-pentafluorotetramethyldihydrorosamine; and 3′-(p-aminophenyl) fluorescein.

[1579] In some embodiments, the composition comprises a dye that becomes chemiluminescent when oxidized by a cell or a cell component, such as luminol.

[1580] In some embodiments, the composition comprises a dye that fluoresces when de-acetylated and/or oxidized by a cell or a cell component. Examples of such dyes include, but are not limited to, dihydrorhodamines; dihydrofluoresceins; 2′,7′-dichlorodihydrofluorescein diacetate; 5-(and 6-)carboxy-2′,7′-dichlorodihydrofluorescein diacetate; and chloromethyl-2′,7′-dichlorodihydrofluorescein diacetate acetyl ester.

[1581] In some embodiments, the composition comprises a dye that fluoresces when reacted with a peptidase. Examples of such dyes include, but are not limited to, (CBZ-Ala-Ala-Ala-Ala)2-R110 elastase 2; (CBZ-Ala-Ala-Asp)2-R110 granzyme B; and 7-amino-4-methylcoumarin, N-CBZ-L-aspartyl-L-glutamyl-L-valyl-L-aspartic acid amide.

[1582] In some embodiments, the composition comprises a dye selected from the group consisting of resazurin, FDA, Calcein AM, and SYTO® 9. In some embodiments, the dye is FDA or SYTO® 9.

[1583] SYTO® 9, when used alone, labels the nucleic acid of bacteria cells. The excitation/emission wavelengths for SYTO® 9 is 480/500 nm, with the background remaining non-fluorescent. See, e.g., J. Appl. Bacteriol. 72, 410 (1992); Lett. Appl. Microbiol. 13, 58 (1991); Curr. Microbiol. 4, 321 (1980); J. Microbiol. Methods 13, 87 (1991); and Microbiol. Rev. 51, 365 (1987); and J. Med. Microbiol. 39, 147 (1993).

[1584] FDA is a non-polar, non-fluorescent compound that can cross the membranes of mammalian and bacterial cells. The acetyl esterases (present only within viable cells) hydrolyze the FDA into the fluorescent compound fluorescein. Fluorescein is a fluorescent polar compound that is retained within these cells. Living cells can be visualized in a photospectrometer when assayed with an excitation wavelength of 494 nm and an emission wavelength of 518 nm. See, e.g., Brunius, G. (1980). Technical aspects of the use of 3′,6′-Diacetyl fluorescein for vital fluorescent staining of bacteria. Current Microbiol. 4: 321-323; Jones, K. H. and Senft, J. A. (1985). An improved method to determine cellviability by simultaneous staining with fluorescein diacetate-propidium iodide. J. Histochem. Cytochem. 33: 77-79; Ross, R. D. , Joneckis, C. C., Ordonez, J. V, Sisk, A. M., Wu, R. K., Hamburger, A. W., and Nora, R. E. (1989). Estimation of cell survival by flow cytometric quantifcation of fluorescein diacetate/propidium iodide viable cell number. Cancer Research. 49: 3776-3782.

[1585] Calcein-AM, which is an acetoxylmethyl ester of calcein, is highly lipophilic and cell permeable. Calcein-AM in itself is not fluorescent, but the calcein generated by esterase in a viable cell emits a green fluorescence with an excitation wavelength of 490 nm and an emission of 515 nm. Therefore, Calcein-AM can only stain viable cells. See, e.g., Kimura, K., et al., Neurosci. Lett., 208, 53 (1998); Shimokawa, I., et al., J. Geronto., 51a, b49 (1998); Yoshida, S., et al., Clin. Nephrol., 49, 273 (1998); and Tominaga, H., et al., Anal. Commun., 36, 47 (1999).

[1586] Resazuirn (also known as Alamar Blue) is a blue compound that can be reduced to pink resorufin which is fluorescent. This dye is mainly used in viability assays for mammalian cells. C¹²-resazurin has better cell permeability than resazurin. When lipohilic C¹²-resazurin crosses the cell membranes, it is subsequently reduced by living cells to make a red fluorescent resorufin. The adsorption/emission of C¹²-resazurin is 563/587 nm. See, e.g., Appl Environ Microbiol 56, 3785 (1990); J Dairy Res 57, 239 (1990); J Neurosci Methods 70, 195 (1996); J Immunol Methods 210, 25 (1997); J Immunol Methods 213, 157 (1998); Antimicrob Agents Chemother 41, 1004 (1997).

[1587] In some embodiments, the composition optionally further comprises a reagent for selective lysis of eukaryotic cells. In some embodiments, the composition comprises a dye as described herein and a reagent for selective lysis of eukaryotic cells. In some embodiments, the reagent for selective lysis of eukaryotic cells is a detergent, such as a non-ionic or an ionic detergent. Examples of the reagent for selective lysis of eukaryotic cells include, but are not limited to, alkylglycosides, Brij 35 (C12E23 Polyoxyethyleneglycol dodecyl ether), Brij 58 (C16E20 Polyoxyethyleneglycol dodecyl ether), Genapol, glucanids such as MEGA-8, -9, -10, octylglucoside, Pluronic F127, Triton X-100 (C₁₄H₂₂O(C₂H₄O)n), Triton X-114 (C₂₄H₄₂O₆), Tween 20 (Polysorbate 20) and Tween 80 (Polysorbate 80), Nonidet P40, deoxycholate, reduced Triton X-100 and/or Igepal CA 630. In some embodiments, the composition comprises a dye as described herein and deoxycholate (e.g., sodium deoxycholate) as a reagent for selective lysis of eukaryotic cells. In some embodiments, the composition comprises deoxycholate at a concentration selected from 0.0001% to 1 wt %. In some embodiments, the composition comprises deoxycholate at a concentration of 0.005 wt %. In some embodiments, the composition may comprise more than one reagent for selective lysis of eukaryotic cells.

[1588] In some embodiments, the composition may comprise two different reagents for selective lysis of eukaryotic cells. In some instances, when more than one selective lysis reagents are used, more effective and/or complete selective lysis of eukaryotic cells in a sample may be achieved. For example, the composition may comprise deoxycholate (e.g., sodium deoxycholate) and Triton X-100 as two different reagents for selective lysis of eukaryotic cells. In some embodiments, the composition comprises deoxycholate (e.g., sodium deoxycholate) at a concentration selected from 0.0001% to 1 wt % (e.g., 0.005 wt %) and Triton X-100 at a concentration selected from 0.1 to 0.05 wt %.

[1589] In some embodiments, after a sample (e.g., a biological sample) is treated or contacted with a composition comprising a dye and one or more reagents for selective lysis of eukaryotic cells as described herein, the eukaryotic cells (e.g., animal cells) in the sample are selectively lysed whereby a substantial percentage (e.g., more than 20%, 40%, 60%, 80%, 90% or even more that 95%) of the bacterial cells in the same sample remains intact or alive.

[1590] In some embodiments, the composition does not comprise a reagent for selective lysis of eukaryotic cells, and such a composition is useful for detecting or quantifying viable bacterial cells in a sample (e.g., an environmental sample such as a water sample) that does not contain any eukaryotic cells.

[1591] In some embodiments, the composition further comprises an electrolyte, such as a divalent electrolyte (e.g., MgCl₂). In some embodiments, the composition comprises MgCl₂ at a concentration selected from 0.1 mM to 100 mM (e.g., a concentration selected from 0.5 mM to 50 mM).

[1592] In some embodiments, the composition further comprises water and is in a form of an aqueous solution. In some embodiments, the composition has a pH selected from 5-8 (e.g., a pH selected from 6-7.8, such as pH being 6.0). In some embodiments, the composition is a solid or a semi-solid.

[1593] In some embodiments, the composition further comprises an anti-fungal agent. Suitable anti-fungal agents for use herein include, but are not limited to, fungicidal and fungistatic agents including terbinafine, itraconazole, micronazole nitrate, thiapendazole, tolnaftate, clotrimazole and griseofulvin. In some embodiments, the anti-fungal agent is a polyene anti-fungal agent, such as amphotericin-B, nystatin, and pimaricin.

[1594] In some embodiments, the composition does not contain any anti-fungal agent. In some embodiments, the composition contains broad spectrum antibiotics but not any anti-fungal agent. Such compositions that do not contain anti-fungal agents but contain broad spectrum antibiotics may be useful in detecting or quantifying fungi (e.g., yeast) in a sample.

[1595] In some embodiments, the composition does not contain any anti-fungal agent, any antibiotics or any anti-mammalian agent. Such compositions that do not selectively lyse mammalian cells may be useful in detecting or quantifying mammalian cells (e.g., cells from the GI tract) in a sample since many dyes have a higher affinity for mammalian as compared to bacteria or fungi cells. In some embodiments, the composition contains broad spectrum antibiotics and one or more anti-fungal agents. Such compositions that contain anti-fungal agents and broad spectrum antibiotics may be useful in detecting or quantifying mammalian cells (e.g., cells from the GI tract) in a sample. The detection or quantification of mammalian cells may be useful for determining cell turnover in a subject. High cell turnover is sometimes associated with a GI injury (e.g., lesion), the presence of a tumor(s), or radiation-induced colitis or radiation enteropathy.

[1596] In some embodiments, the composition further comprises an antibiotic agent as described herein. Such a composition may be useful in detecting or quantifying antibiotic-resistant strains of bacteria in a sample.

[1597] In certain embodiments, the composition comprises Triton X-100, deoxycholate, resazurin, and MgCl₂. In some embodiments, the composition comprises Triton X-100, deoxycholate, resazurin, amphotericin-B and MgCl₂. In some embodiments, the composition comprises 0.1 wt % or 0.05 wt % Triton X-100; 0.005 wt % deoxycholate; 10 mM resazurin; 2.5 mg/L amphotericin-B and 50 mM MgCl₂. In some embodiments, the composition has a pH of 6.0.

[1598] In certain embodiments, the compositions are suitable for use in a kit or device, e.g., for detecting or quantifying viable bacterial cells in a sample. In some embodiments, such a device is an ingestible device for detecting or quantifying viable bacterial cells in vivo (e.g., in the GI tract).

[1599] FIG. 62 illustrates a nonlimiting example of a system for collecting, communicating and/or analyzing data about a subject, using an ingestible device as disclosed herein. For example, an ingestible device may be configured to communicate with an external base station. As an example, an ingestible device can have a communications unit that communicates with an external base station which itself has a communications unit. FIG. 62 illustrates exemplary implementation of such an ingestible device. As shown in FIG. 62, a subject ingests an ingestible device as disclosed herein. Certain data about the subject (e.g., based on a collected sample) and/or the location of the ingestible device in the GI tract of the subject is collected or otherwise available and provided to a mobile device, which then forwards the data via the internet and a server/data store to a physician's office computer. The information collected by the ingestible device is communicated to a receiver, such as, for example, a watch or other object worn by the subject. The information is then communicated from the receiver to the mobile device which then forwards the data via the internet and a server/data store to a physician's office computer. The physician is then able to analyze some or all of the data about the subject to provide recommendations, such as, for example, delivery a therapeutic agent. While FIG. 62 shows a particular approach to collecting and transferring data about a subject, the disclosure is not limited. As an example, one or more of the receiver, mobile device, internet, and/or server/data store can be excluded from the data communication channel. For example, a mobile device can be used as the receiver of the device data, e.g., by using a dongle. In such embodiments, the item worn by the subject need not be part of the communication chain. As another example, one or more of the items in the data communication channel can be replaced with an alternative item. For example, rather than be provided to a physician's office computer, data may be provided to a service provider network, such as a hospital network, an HMO network, or the like. In some embodiments, subject data may be collected and/or stored in one location (e.g., a server/data store) while device data may be collected and/or stored in a different location (e.g., a different server/data store).

### Locations of Release

[1600] In some embodiments, the immune modulator is delivered at a location in the large intestine of the subject. In some embodiments, the location is in the proximal portion of the large intestine. In some embodiments, the location is in the distal portion of the large intestine.

[1601] In some embodiments, the immune modulator is delivered at a location in the ascending colon of the subject. In some embodiments, the location is in the proximal portion of the ascending colon. In some embodiments, the location is in the distal portion of the ascending colon.

[1602] In some embodiments, the immune modulator is delivered at a location in the cecum of the subject. In some embodiments, the location is in the proximal portion of the cecum. In some embodiments, the location is in the distal portion of the cecum.

[1603] In some embodiments, the immune modulator is delivered at a location in the sigmoid colon of the subject. In some embodiments, the location is in the proximal portion of the sigmoid colon. In some embodiments, the location is in the distal portion of the sigmoid colon.

[1604] In some embodiments, the immune modulator is delivered at a location in the transverse colon of the subject. In some embodiments, the location is in the proximal portion of the transverse colon. In some embodiments, the location is in the distal portion of the transverse colon.

[1605] In some embodiments, the immune modulator is delivered at a location in the descending colon of the subject. In some embodiments, the location is in the proximal portion of the descending colon. In some embodiments, the location is in the distal portion of the descending colon.

[1606] In some embodiments, the immune modulator is delivered at a location in the small intestine of the subject. In some embodiments, the location is in the proximal portion of the small intestine. In some embodiments, the location is in the distal portion of the small intestine.

[1607] In some embodiments, the immune modulator is delivered at a location in the duodenum of the subject. In some embodiments, the location is in the proximal portion of the duodenum. In some embodiments, the location is in the distal portion of the duodenum.

[1608] In some embodiments, the immune modulator is delivered at a location in the jejunum of the subject. In some embodiments, the location is in the proximal portion of the jejunum. In some embodiments, the location is in the distal portion of the jejunum.

[1609] In some embodiments, the immune modulator is delivered at a location in the duodenum of the subject and is not delivered at other locations in the gastrointestinal tract.

[1610] In some embodiments, the immune modulator is delivered at a location in the proximal duodenum of the subject and is not delivered at other locations in the gastrointestinal tract.

[1611] In some embodiments, the immune modulator is delivered at a location in the jejunum of the subject and is not delivered at other locations in the gastrointestinal tract.

[1612] In some embodiments, the immune modulator is delivered at a location in the proximal portion of the jejunum of the subject and is not delivered at other locations in the gastrointestinal tract.

[1613] In some embodiments, the immune modulator is delivered at a location in the distal portion of the jejunum of the subject and is not delivered at other locations in the gastrointestinal tract.

[1614] In some embodiments, the immune modulator is delivered at a location in the ileum of the subject. In some embodiments, the location is in the proximal portion of the ileum. In some embodiments, the location is in the distal portion of the ileum.

[1615] In some embodiments, the immune modulator is delivered at a location in the ileum of the subject and is not delivered at other locations in the gastrointestinal tract.

[1616] In some embodiments, the immune modulator is delivered at a location in the proximal portion of the ileum of the subject and is not delivered at other locations in the gastrointestinal tract.

[1617] In some embodiments, the immune modulator is delivered at a location in the distal portion of the ileum of the subject and is not delivered at other locations in the gastrointestinal tract.

[1618] In some embodiments, the immune modulator is delivered at a location in the cecum of the subject and is not delivered at other locations in the gastrointestinal tract.

[1619] In some embodiments, the location at which the immune modulator is delivered is proximate to the intended site of release of the immune modulator. In some embodiments, the immune modulator is delivered 150 cm or less from the one or more sites of disease. In some embodiments, the immune modulator is delivered 125 cm or less from the one or more sites of disease. In some embodiments, the immune modulator is delivered 100 cm or less from the one or more sites of disease. In some embodiments, the immune modulator is delivered 50 cm or less from the intended site of release. In some embodiments, the immune modulator is delivered 40 cm or less from the intended site of release. In some embodiments, the immune modulator is delivered 30 cm or less from the intended site of release. In some embodiments, the immune modulator is delivered 20 cm or less from the intended site of release. In some embodiments, the immune modulator is delivered 10 cm or less from the intended site of release. In some embodiments, the immune modulator is delivered 5 cm or less from the intended site of release. In some embodiments, the immune modulator is delivered 2 cm or less from the intended site of release. In some embodiments, the method further comprises using an ingestible device to deliver the immune modulator and using localization methods disclosed herein (e.g., such as discussed in Example 14 below) to determine the location of the ingestible device within the GI tract. In some embodiments, the method further comprises using an ingestible device to deliver the immune modulator and determining the period of time since the ingestible device was ingested to determine the location of the ingestible device within the GI tract. In some embodiments, the method further comprises imaging of the gastrointestinal tract. In some embodiments, imaging of the gastrointestinal tract comprises video imaging. In some embodiments, imaging of the gastrointestinal tract comprises thermal imaging. In some embodiments, imaging of the gastrointestinal tract comprises ultrasound imaging. In some embodiments, imaging of the gastrointestinal tract comprises Doppler imaging.

[1620] In some embodiments the method does not comprise releasing more than 20% of the immune modulator at a location that is not proximate to the intended site of release. In some embodiments the method does not comprise releasing more than 10% of the immune modulator at a location that is not proximate to the intended site of release. In some embodiments the method does not comprise releasing more than 5% of the immune modulator at a location that is not proximate to the intended site of release. In some embodiments the method does not comprise releasing more than 4% of the immune modulator at a location that is not proximate to the intended site of release. In some embodiments the method does not comprise releasing more than 3% of the immune modulator at a location that is not proximate to the intended site of release. In some embodiments the method does not comprise releasing more than 2% of the immune modulator at a location that is not proximate to the intended site of release.

[1621] In some embodiments the method comprises releasing at least 80% of the immune modulator at a location proximate to a site of disease. In some embodiments the method comprise releasing at least 90% of the immune modulator at a location proximate to a site of disease. In some embodiments the method comprises releasing at least 95% of the immune modulator at a location proximate to a site of disease. In some embodiments the method comprises releasing at least 96% of the immune modulator at a location proximate to a site of disease. In some embodiments the method comprises releasing at least 97% of the immune modulator at a location proximate to a site of disease. In some embodiments the method comprises releasing at least 98% of the immune modulator at a location proximate to a site of disease. In some embodiments, the at least 80%, at least 90%, at least 95%, at least 96%, at least 97%, or at least 98% of the immune modulator is delivered 150 cm or less from the one or more sites of disease. In some embodiments, the at least 80%, at least 90%, at least 95%, at least 96%, at least 97%, or at least 98% of the immune modulator is delivered 125 cm or less from the one or more sites of disease. In some embodiments, the at least 80%, at least 90%, at least 95%, at least 96%, at least 97%, or at least 98% of the immune modulator is delivered 100 cm or less from the one or more sites of disease. In some embodiments, the at least 80%, at least 90%, at least 95%, at least 96%, at least 97%, or at least 98% of the immune modulator is delivered 50 cm or less from the one or more sites of disease. In some embodiments, the at least 80%, at least 90%, at least 95%, at least 96%, at least 97%, or at least 98% of the immune modulator is delivered 40 cm or less from the one or more sites of disease. In some embodiments, the at least 80%, at least 90%, at least 95%, at least 96%, at least 97%, or at least 98% of the immune modulator is delivered 30 cm or less from the one or more sites of disease. In some embodiments, the at least 80%, at least 90%, at least 95%, at least 96%, at least 97%, or at least 98% of the immune modulator is delivered 20 cm or less from the one or more sites of disease. In some embodiments, the at least 80%, at least 90%, at least 95%, at least 96%, at least 97%, or at least 98% of the immune modulator is delivered 10 cm or less from the one or more sites of disease. In some embodiments, the at least 80%, at least 90%, at least 95%, at least 96%, at least 97%, or at least 98% of the immune modulator is delivered 5 cm or less from the one or more sites of disease. In some embodiments, the at least 80%, at least 90%, at least 95%, at least 96%, at least 97%, or at least 98% of the immune modulator is delivered 2 cm or less from the one or more sites of disease. In some embodiments, the method further comprises using an ingestible device to deliver the immune modulator and using localization methods disclosed herein (e.g., such as discussed in Example 14 below) to determine the location of the ingestible device within the GI tract (e.g., relative to the site of disease). In some embodiments, the method further comprises using an ingestible device to deliver the immune modulator and determining the period of time since the ingestible device was ingested to determine the location of the ingestible device within the GI tract (e.g., relative to the site of disease).

[1622] In some embodiments, the amount of immune modulator that is delivered is a Human Equivalent Dose.

[1623] In some embodiments the method comprises releasing the immune modulator at a location that is proximate to the intended site of release, wherein the immune modulator and, if applicable, any carriers, excipients or stabilizers admixed with the immune modulator, are substantially unchanged, at the time of release of the immune modulator at the location, relatively to the time of administration of the composition to the subject.

[1624] In some embodiments the method comprises releasing the immune modulator at a location that is proximate to the intended site of release, wherein the immune modulator and, if applicable, any carriers, excipients or stabilizers admixed with the immune modulator, are substantially unchanged by any physiological process (such as, but not limited to, degradation in the stomach), at the time of release of the immune modulator at the location, relatively to the time of administration of the composition to the subject.

[1625] In some embodiments, the immune modulator is delivered to the location by mucosal contact.

[1626] In some embodiments, a method of treatment disclosed herein includes determining the level of an immune modulator at the intended site of release or a location in the gastrointestinal tract of the subject that is proximate to the intended site of release. In some examples, a method of treatment as described herein can include determining the level of the immune modulator at the intended site of release or a location in the gastrointestinal tract of the subject that is proximate to the intended site of release within a time period of about 10 minutes to about 10 hours following administration of the device.

[1627] In some examples, a method of treatment disclosed herein includes determining the level of the anti-inflammatory at the intended site of release or a location in the gastrointestinal tract of the subject that is proximate to the intended site of release at a time point following administration of the device that is elevated as compared to a level of the immune modulator at the same site of release or location at substantially the same time point in a subject following systemic administration of an equal amount of the the immune modulator.

[1628] As used herein, “GI tissue” refers to tissue in the gastrointestinal (GI) tract, such as tissue in one or more of duodenum, jejunum, ileum, cecum, ascending colon, transverse colon, descending colon, sigmoid colon, and rectum, more particularly in the proximal portion of one or more of duodenum, jejunum, ileum, cecum, ascending colon, transverse colon, descending colon, and sigmoid colon, or in the distal portion of one or more of duodenum, jejunum, ileum, cecum, ascending colon, transverse colon, descending colon, and sigmoid colon. Accordingly, in some embodiments the immune modulator can penetrate the dudodenum tissue proximate to the intended site of release. In some embodiments the immune modulator can penetrate the jejunum tissue proximate to the intended site of release. In some embodiments the immune modulator can penetrate the ileum tissue proximate to the intended site of release. In some embodiments the immune modulator can penetrate the cecum tissue proximate to the intended site of release. In some embodiments the immune modulator can penetrate the ascending colon tissue proximate to the intended site of release. In some embodiments the immune modulator can penetrate the transverse colon tissue proximate to the intended site of release. In some embodiments the immune modulator can penetrate the descending colon tissue proximate to the intended site of release. In some embodiments the immune modulator can penetrate the sigmoid colon tissue proximate to the intended site of release. For example, an immune modulator can penetrate one or more (e.g., two, three, or four) of the lumen/superficial mucosa, the lamina propria, the submucosa, and the tunica muscularis/serosa.

[1629] In some examples, administration of an immune modulator using any of the compositions or devices described herein results in penetration (e.g., a detectable level of penetration) of GI tissue (e.g., one or more (e.g., two, three, or four) of the lumen/superficial mucosa, the lamina propria, the submucosa, and the tunica muscularis/serosa) within a time period of about 10 minutes to about 10 hours, about 10 minutes to about 9 hours, about 10 minutes to about 8 hours, about 10 minutes to about 7 hours, about 10 minutes to about 6 hours, about 10 minutes to about 5 hours, about 10 minutes to about 4.5 hours, about 10 minutes to about 4 hours, about 10 minutes to about 3.5 hours, about 10 minutes to about 3 hours, about 10 minutes to about 2.5 hours, about 10 minutes to about 2 hours, about 10 minutes to about 1.5 hours, about 10 minutes to about 1 hour, about 10 minutes to about 55 minutes, about 10 minutes to about 50 minutes, about 10 minutes to about 45 minutes, about 10 minutes to about 40 minutes, about 10 minutes to about 35 minutes, about 10 minutes to about 30 minutes, about 10 minutes to about 25 minutes, about 10 minutes to about 20 minutes, about 10 minutes to about 15 minutes, about 15 minutes to about 10 hours, about 15 minutes to about 9 hours, about 15 minutes to about 8 hours, about 15 minutes to about 7 hours, about 15 minutes to about 6 hours, about 15 minutes to about 5 hours, about 15 minutes to about 4.5 hours, about 15 minutes to about 4 hours, about 15 minutes to about 3.5 hours, about 15 minutes to about 3 hours, about 15 minutes to about 2.5 hours, about 15 minutes to about 2 hours, about 15 minutes to about 1.5 hours, about 15 minutes to about 1 hour, about 15 minutes to about 55 minutes, about 15 minutes to about 50 minutes, about 15 minutes to about 45 minutes, about 15 minutes to about 40 minutes, about 15 minutes to about 35 minutes, about 15 minutes to about 30 minutes, about 15 minutes to about 25 minutes, about 15 minutes to about 20 minutes, about 20 minutes to about 10 hours, about 20 minutes to about 9 hours, about 20 minutes to about 8 hours, about 20 minutes to about 7 hours, about 20 minutes to about 6 hours, about 20 minutes to about 5 hours, about 20 minutes to about 4.5 hours, about 20 minutes to about 4 hours, about 20 minutes to about 3.5 hours, about 20 minutes to about 3 hours, about 20 minutes to about 2.5 hours, about 20 minutes to about 2 hours, about 20 minutes to about 1.5 hours, about 20 minutes to about 1 hour, about 20 minutes to about 55 minutes, about 20 minutes to about 50 minutes, about 20 minutes to about 45 minutes, about 20 minutes to about 40 minutes, about 20 minutes to about 35 minutes, about 20 minutes to about 30 minutes, about 20 minutes to about 25 minutes, about 25 minutes to about 10 hours, about 25 minutes to about 9 hours, about 25 minutes to about 8 hours, about 25 minutes to about 7 hours, about 25 minutes to about 6 hours, about 25 minutes to about 5 hours, about 25 minutes to about 4.5 hours, about 25 minutes to about 4 hours, about 25 minutes to about 3.5 hours, about 25 minutes to about 3 hours, about 25 minutes to about 2.5 hours, about 25 minutes to about 2 hours, about 25 minutes to about 1.5 hours, about 25 minutes to about 1 hour, about 25 minutes to about 55 minutes, about 25 minutes to about 50 minutes, about 25 minutes to about 45 minutes, about 25 minutes to about 40 minutes, about 25 minutes to about 35 minutes, about 25 minutes to about 30 minutes, about 30 minutes to about 10 hours, about 30 minutes to about 9 hours, about 30 minutes to about 8 hours, about 30 minutes to about 7 hours, about 30 minutes to about 6 hours, about 30 minutes to about 5 hours, about 30 minutes to about 4.5 hours, about 30 minutes to about 4 hours, about 30 minutes to about 3.5 hours, about 30 minutes to about 3 hours, about 30 minutes to about 2.5 hours, about 30 minutes to about 2 hours, about 30 minutes to about 1.5 hours, about 30 minutes to about 1 hour, about 30 minutes to about 55 minutes, about 30 minutes to about 50 minutes, about 30 minutes to about 45 minutes, about 30 minutes to about 40 minutes, about 30 minutes to about 35 minutes, about 35 minutes to about 10 hours, about 35 minutes to about 9 hours, about 35 minutes to about 8 hours, about 35 minutes to about 7 hours, about 35 minutes to about 6 hours, about 35 minutes to about 5 hours, about 35 minutes to about 4.5 hours, about 35 minutes to about 4 hours, about 35 minutes to about 3.5 hours, about 35 minutes to about 3 hours, about 35 minutes to about 2.5 hours, about 35 minutes to about 2 hours, about 35 minutes to about 1.5 hours, about 35 minutes to about 1 hour, about 35 minutes to about 55 minutes, about 35 minutes to about 50 minutes, about 35 minutes to about 45 minutes, about 35 minutes to about 40 minutes, about 40 minutes to about 10 hours, about 40 minutes to about 9 hours, about 40 minutes to about 8 hours, about 40 minutes to about 7 hours, about 40 minutes to about 6 hours, about 40 minutes to about 5 hours, about 40 minutes to about 4.5 hours, about 40 minutes to about 4 hours, about 40 minutes to about 3.5 hours, about 40 minutes to about 3 hours, about 40 minutes to about 2.5 hours, about 40 minutes to about 2 hours, about 40 minutes to about 1.5 hours, about 40 minutes to about 1 hour, about 40 minutes to about 55 minutes, about 40 minutes to about 50 minutes, about 40 minutes to about 45 minutes, about 45 minutes to about 10 hours, about 45 minutes to about 9 hours, about 45 minutes to about 8 hours, about 45 minutes to about 7 hours, about 45 minutes to about 6 hours, about 45 minutes to about 5 hours, about 45 minutes to about 4.5 hours, about 45 minutes to about 4 hours, about 45 minutes to about 3.5 hours, about 45 minutes to about 3 hours, about 45 minutes to about 2.5 hours, about 45 minutes to about 2 hours, about 45 minutes to about 1.5 hours, about 45 minutes to about 1 hour, about 45 minutes to about 55 minutes, about 45 minutes to about 50 minutes, about 50 minutes to about 10 hours, about 50 minutes to about 9 hours, about 50 minutes to about 8 hours, about 50 minutes to about 7 hours, about 50 minutes to about 6 hours, about 50 minutes to about 5 hours, about 50 minutes to about 4.5 hours, about 50 minutes to about 4 hours, about 50 minutes to about 3.5 hours, about 50 minutes to about 3 hours, about 50 minutes to about 2.5 hours, about 50 minutes to about 2 hours, about 50 minutes to about 1.5 hours, about 50 minutes to about 1 hour, about 50 minutes to about 55 minutes, about 55 minutes to about 10 hours, about 55 minutes to about 9 hours, about 55 minutes to about 8 hours, about 55 minutes to about 7 hours, about 55 minutes to about 6 hours, about 55 minutes to about 5 hours, about 55 minutes to about 4.5 hours, about 55 minutes to about 4 hours, about 55 minutes to about 3.5 hours, about 55 minutes to about 3 hours, about 55 minutes to about 2.5 hours, about 55 minutes to about 2 hours, about 55 minutes to about 1.5 hours, about 55 minutes to about 1 hour, about 1 hour to about 10 hours, about 1 hour to about 9 hours, about 1 hour to about 8 hours, about 1 hour to about 7 hours, about 1 hour to about 6 hours, about 1 hour to about 5 hours, about 1 hour to about 4.5 hours, about 1 hour to about 4 hours, about 1 hour to about 3.5 hours, about 1 hour to about 3 hours, about 1 hour to about 2.5 hours, about 1 hour to about 2 hours, about 1 hour to about 1.5 hours, about 1.5 hours to about 10 hours, about 1.5 hours to about 9 hours, about 1.5 hours to about 8 hours, about 1.5 hours to about 7 hours, about 1.5 hours to about 6 hours, about 1.5 hours to about 5 hours, about 1.5 hours to about 4.5 hours, about 1.5 hours to about 4 hours, about 1.5 hours to about 3.5 hours, about 1.5 hours to about 3 hours, about 1.5 hours to about 2.5 hours, about 1.5 hours to about 2 hours, about 2 hours to about 10 hours, about 2 hours to about 9 hours, about 2 hours to about 8 hours, about 2 hours to about 7 hours, about 2 hours to about 6 hours, about 2 hours to about 5 hours, about 2 hours to about 4.5 hours, about 2 hours to about 4 hours, about 2 hours to about 3.5 hours, about 2 hours to about 3 hours, about 2 hours to about 2.5 hours, about 2.5 hours to about 10 hours, about 2.5 hours to about 9 hours, about 2.5 hours to about 8 hours, about 2.5 hours to about 7 hours, about 2.5 hours to about 6 hours, about 2.5 hours to about 5 hours, about 2.5 hours to about 4.5 hours, about 2.5 hours to about 4 hours, about 2.5 hours to about 3.5 hours, about 2.5 hours to about 3 hours, about 3 hours to about 10 hours, about 3 hours to about 9 hours, about 3 hours to about 8 hours, about 3 hours to about 7 hours, about 3 hours to about 6 hours, about 3 hours to about 5 hours, about 3 hours to about 4.5 hours, about 3 hours to about 4 hours, about 3 hours to about 3.5 hours, about 3.5 hours to about 10 hours, about 3.5 hours to about 9 hours, about 3.5 hours to about 8 hours, about 3.5 hours to about 7 hours, about 3.5 hours to about 6 hours, about 3.5 hours to about 5 hours, about 3.5 hours to about 4.5 hours, about 3.5 hours to about 4 hours, about 4 hours to about 10 hours, about 4 hours to about 9 hours, about 4 hours to about 8 hours, about 4 hours to about 7 hours, about 4 hours to about 6 hours, about 4 hours to about 5 hours, about 4 hours to about 4.5 hours, about 4.5 hours to about 10 hours, about 4.5 hours to about 9 hours, about 4.5 hours to about 8 hours, about 4.5 hours to about 7 hours, about 4.5 hours to about 6 hours, about 4.5 hours to about 5 hours, about 5 hours to about 10 hours, about 5 hours to about 9 hours, about 5 hours to about 8 hours, about 5 hours to about 7 hours, about 5 hours to about 6 hours, about 6 hours to about 10 hours, about 6 hours to about 9 hours, about 6 hours to about 8 hours, about 6 hours to about 7 hours, about 7 hours to about 10 hours, about 7 hours to about 9 hours, about 7 hours to about 8 hours, about 8 hours to about 10 hours, about 8 hours to about 9 hours, or about 9 hours to about 10 hours. Penetration of GI tissue by an immune modulator can be detected by administering a labeled immune modulator, and performing imaging on the subject (e.g., ultrasound, computed tomography, or magnetic resonance imaging). For example, the label can be a radioisotope, a heavy metal, a fluorophore, or a luminescent agent (e.g., any suitable radioisotopes, heavy metals, fluorophores, or luminescent agents used for imaging known in the art).

[1630] In some embodiments, administration of an immune modulator can provide for treatment (e.g., a reduction in the number, severity, and/or duration of one or more symptoms of any of the disorders described herein in a subject) for a time period of between about 1 hour to about 30 days, about 1 hour to about 28 days, about 1 hour to about 26 days, about 1 hour to about 24 days, about 1 hour to about 22 days, about 1 hour to about 20 days, about 1 hour to about 18 days, about 1 hour to about 16 days, about 1 hour to about 14 days, about 1 hour to about 12 days, about 1 hour to about 10 days, about 1 hour to about 8 days, about 1 hour to about 6 days, about 1 hour to about 5 days, about 1 hour to about 4 days, about 1 hour to about 3 days, about 1 hour to about 2 days, about 1 hour to about 1 day, about 1 hour to about 12 hours, about 1 hour to about 6 hours, about 1 hour to about 3 hours, about 3 hours to about 30 days, about 3 hours to about 28 days, about 3 hours to about 26 days, about 3 hours to about 24 days, about 3 hours to about 22 days, about 3 hours to about 20 days, about 3 hours to about 18 days, about 3 hours to about 16 days, about 3 hours to about 14 days, about 3 hours to about 12 days, about 3 hours to about 10 days, about 3 hours to about 8 days, about 3 hours to about 6 days, about 3 hours to about 5 days, about 3 hours to about 4 days, about 3 hours to about 3 days, about 3 hours to about 2 days, about 3 hours to about 1 day, about 3 hours to about 12 hours, about 3 hours to about 6 hours, about 6 hours to about 30 days, about 6 hours to about 28 days, about 6 hours to about 26 days, about 6 hours to about 24 days, about 6 hours to about 22 days, about 6 hours to about 20 days, about 6 hours to about 18 days, about 6 hours to about 16 days, about 6 hours to about 14 days, about 6 hours to about 12 days, about 6 hours to about 10 days, about 6 hours to about 8 days, about 6 hours to about 6 days, about 6 hours to about 5 days, about 6 hours to about 4 days, about 6 hours to about 3 days, about 6 hours to about 2 days, about 6 hours to about 1 day, about 6 hours to about 12 hours, about 12 hours to about 30 days, about 12 hours to about 28 days, about 12 hours to about 26 days, about 12 hours to about 24 days, about 12 hours to about 22 days, about 12 hours to about 20 days, about 12 hours to about 18 days, about 12 hours to about 16 days, about 12 hours to about 14 days, about 12 hours to about 12 days, about 12 hours to about 10 days, about 12 hours to about 8 days, about 12 hours to about 6 days, about 12 hours to about 5 days, about 12 hours to about 4 days, about 12 hours to about 3 days, about 12 hours to about 2 days, about 12 hours to about 1 day, about 1 day to about 30 days, about 1 day to about 28 days, about 1 day to about 26 days, about 1 day to about 24 days, about 1 day to about 22 days, about 1 day to about 20 days, about 1 day to about 18 days, about 1 day to about 16 days, about 1 day to about 14 days, about 1 day to about 12 days, about 1 day to about 10 days, about 1 day to about 8 days, about 1 day to about 6 days, about 1 day to about 5 days, about 1 day to about 4 days, about 1 day to about 3 days, about 1 day to about 2 days, about 2 days to about 30 days, about 2 days to about 28 days, about 2 days to about 26 days, about 2 days to about 24 days, about 2 days to about 22 days, about 2 days to about 20 days, about 2 days to about 18 days, about 2 days to about 16 days, about 2 days to about 14 days, about 2 days to about 12 days, about 2 days to about 10 days, about 2 days to about 8 days, about 2 days to about 6 days, about 2 days to about 5 days, about 2 days to about 4 days, about 2 days to about 3 days, about 3 days to about 30 days, about 3 days to about 28 days, about 3 days to about 26 days, about 3 days to about 24 days, about 3 days to about 22 days, about 3 days to about 20 days, about 3 days to about 18 days, about 3 days to about 16 days, about 3 days to about 14 days, about 3 days to about 12 days, about 3 days to about 10 days, about 3 days to about 8 days, about 3 days to about 6 days, about 3 days to about 5 days, about 3 days to about 4 days, about 4 days to about 30 days, about 4 days to about 28 days, about 4 days to about 26 days, about 4 days to about 24 days, about 4 days to about 22 days, about 4 days to about 20 days, about 4 days to about 18 days, about 4 days to about 16 days, about 4 days to about 14 days, about 4 days to about 12 days, about 4 days to about 10 days, about 4 days to about 8 days, about 4 days to about 6 days, about 4 days to about 5 days, about 5 days to about 30 days, about 5 days to about 28 days, about 5 days to about 26 days, about 5 days to about 24 days, about 5 days to about 22 days, about 5 days to about 20 days, about 5 days to about 18 days, about 5 days to about 16 days, about 5 days to about 14 days, about 5 days to about 12 days, about 5 days to about 10 days, about 5 days to about 8 days, about 5 days to about 6 days, about 6 days to about 30 days, about 6 days to about 28 days, about 6 days to about 26 days, about 6 days to about 24 days, about 6 days to about 22 days, about 6 days to about 20 days, about 6 days to about 18 days, about 6 days to about 16 days, about 6 days to about 14 days, about 6 days to about 12 days, about 6 days to about 10 days, about 6 days to about 8 days, about 8 days to about 30 days, about 8 days to about 28 days, about 8 days to about 26 days, about 8 days to about 24 days, about 8 days to about 22 days, about 8 days to about 20 days, about 8 days to about 18 days, about 8 days to about 16 days, about 8 days to about 14 days, about 8 days to about 12 days, about 8 days to about 10 days, about 10 days to about 30 days, about 10 days to about 28 days, about 10 days to about 26 days, about 10 days to about 24 days, about 10 days to about 22 days, about 10 days to about 20 days, about 10 days to about 18 days, about 10 days to about 16 days, about 10 days to about 14 days, about 10 days to about 12 days, about 12 days to about 30 days, about 12 days to about 28 days, about 12 days to about 26 days, about 12 days to about 24 days, about 12 days to about 22 days, about 12 days to about 20 days, about 12 days to about 18 days, about 12 days to about 16 days, about 12 days to about 14 days, about 14 days to about 30 days, about 14 days to about 28 days, about 14 days to about 26 days, about 14 days to about 24 days, about 14 days to about 22 days, about 14 days to about 20 days, about 14 days to about 18 days, about 14 days to about 16 days, about 16 days to about 30 days, about 16 days to about 28 days, about 16 days to about 26 days, about 16 days to about 24 days, about 16 days to about 22 days, about 16 days to about 20 days, about 16 days to about 18 days, about 18 days to about 30 days, about 18 days to about 28 days, about 18 days to about 26 days, about 18 days to about 24 days, about 18 days to about 22 days, about 18 days to about 20 days, about 20 days to about 30 days, about 20 days to about 28 days, about 20 days to about 26 days, about 20 days to about 24 days, about 20 days to about 22 days, about 22 days to about 30 days, about 22 days to about 28 days, about 22 days to about 26 days, about 22 days to about 24 days, about 24 days to about 30 days, about 24 days to about 28 days, about 24 days to about 26 days, about 26 days to about 30 days, about 26 days to about 28 days, or about 28 days to about 30 days in a subject following first administration of an immune modulator using any of the compositions or devices described herein. Non-limiting examples of symptoms of a disease described herein are described below.

[1631] For example, treatment can result in a decrease (e.g., about 1% to about 99% decrease, about 1% to about 95% decrease, about 1% to about 90% decrease, about 1% to about 85% decrease, about 1% to about 80% decrease, about 1% to about 75% decrease, about 1% to about 70% decrease, about 1% to about 65% decrease, about 1% to about 60% decrease, about 1% to about 55% decrease, about 1% to about 50% decrease, about 1% to about 45% decrease, about 1% to about 40% decrease, about 1% to about 35% decrease, about 1% to about 30% decrease, about 1% to about 25% decrease, about 1% to about 20% decrease, about 1% to about 15% decrease, about 1% to about 10% decrease, about 1% to about 5% decrease, about 5% to about 99% decrease, about 5% to about 95% decrease, about 5% to about 90% decrease, about 5% to about 85% decrease, about 5% to about 80% decrease, about 5% to about 75% decrease, about 5% to about 70% decrease, about 5% to about 65% decrease, about 5% to about 60% decrease, about 5% to about 55% decrease, about 5% to about 50% decrease, about 5% to about 45% decrease, about 5% to about 40% decrease, about 5% to about 35% decrease, about 5% to about 30% decrease, about 5% to about 25% decrease, about 5% to about 20% decrease, about 5% to about 15% decrease, about 5% to about 10% decrease, about 10% to about 99% decrease, about 10% to about 95% decrease, about 10% to about 90% decrease, about 10% to about 85% decrease, about 10% to about 80% decrease, about 10% to about 75% decrease, about 10% to about 70% decrease, about 10% to about 65% decrease, about 10% to about 60% decrease, about 10% to about 55% decrease, about 10% to about 50% decrease, about 10% to about 45% decrease, about 10% to about 40% decrease, about 10% to about 35% decrease, about 10% to about 30% decrease, about 10% to about 25% decrease, about 10% to about 20% decrease, about 10% to about 15% decrease, about 15% to about 99% decrease, about 15% to about 95% decrease, about 15% to about 90% decrease, about 15% to about 85% decrease, about 15% to about 80% decrease, about 15% to about 75% decrease, about 15% to about 70% decrease, about 15% to about 65% decrease, about 15% to about 60% decrease, about 15% to about 55% decrease, about 15% to about 50% decrease, about 15% to about 45% decrease, about 15% to about 40% decrease, about 15% to about 35% decrease, about 15% to about 30% decrease, about 15% to about 25% decrease, about 15% to about 20% decrease, about 20% to about 99% decrease, about 20% to about 95% decrease, about 20% to about 90% decrease, about 20% to about 85% decrease, about 20% to about 80% decrease, about 20% to about 75% decrease, about 20% to about 70% decrease, about 20% to about 65% decrease, about 20% to about 60% decrease, about 20% to about 55% decrease, about 20% to about 50% decrease, about 20% to about 45% decrease, about 20% to about 40% decrease, about 20% to about 35% decrease, about 20% to about 30% decrease, about 20% to about 25% decrease, about 25% to about 99% decrease, about 25% to about 95% decrease, about 25% to about 90% decrease, about 25% to about 85% decrease, about 25% to about 80% decrease, about 25% to about 75% decrease, about 25% to about 70% decrease, about 25% to about 65% decrease, about 25% to about 60% decrease, about 25% to about 55% decrease, about 25% to about 50% decrease, about 25% to about 45% decrease, about 25% to about 40% decrease, about 25% to about 35% decrease, about 25% to about 30% decrease, about 30% to about 99% decrease, about 30% to about 95% decrease, about 30% to about 90% decrease, about 30% to about 85% decrease, about 30% to about 80% decrease, about 30% to about 75% decrease, about 30% to about 70% decrease, about 30% to about 65% decrease, about 30% to about 60% decrease, about 30% to about 55% decrease, about 30% to about 50% decrease, about 30% to about 45% decrease, about 30% to about 40% decrease, about 30% to about 35% decrease, about 35% to about 99% decrease, about 35% to about 95% decrease, about 35% to about 90% decrease, about 35% to about 85% decrease, about 35% to about 80% decrease, about 35% to about 75% decrease, about 35% to about 70% decrease, about 35% to about 65% decrease, about 35% to about 60% decrease, about 35% to about 55% decrease, about 35% to about 50% decrease, about 35% to about 45% decrease, about 35% to about 40% decrease, about 40% to about 99% decrease, about 40% to about 95% decrease, about 40% to about 90% decrease, about 40% to about 85% decrease, about 40% to about 80% decrease, about 40% to about 75% decrease, about 40% to about 70% decrease, about 40% to about 65% decrease, about 40% to about 60% decrease, about 40% to about 55% decrease, about 40% to about 50% decrease, about 40% to about 45% decrease, about 45% to about 99% decrease, about 45% to about 95% decrease, about 45% to about 90% decrease, about 45% to about 85% decrease, about 45% to about 80% decrease, about 45% to about 75% decrease, about 45% to about 70% decrease, about 45% to about 65% decrease, about 45% to about 60% decrease, about 45% to about 55% decrease, about 45% to about 50% decrease, about 50% to about 99% decrease, about 50% to about 95% decrease, about 50% to about 90% decrease, about 50% to about 85% decrease, about 50% to about 80% decrease, about 50% to about 75% decrease, about 50% to about 70% decrease, about 50% to about 65% decrease, about 50% to about 60% decrease, about 50% to about 55% decrease, about 55% to about 99% decrease, about 55% to about 95% decrease, about 55% to about 90% decrease, about 55% to about 85% decrease, about 55% to about 80% decrease, about 55% to about 75% decrease, about 55% to about 70% decrease, about 55% to about 65% decrease, about 55% to about 60% decrease, about 60% to about 99% decrease, about 60% to about 95% decrease, about 60% to about 90% decrease, about 60% to about 85% decrease, about 60% to about 80% decrease, about 60% to about 75% decrease, about 60% to about 70% decrease, about 60% to about 65% decrease, about 65% to about 99% decrease, about 65% to about 95% decrease, about 65% to about 90% decrease, about 65% to about 85% decrease, about 65% to about 80% decrease, about 65% to about 75% decrease, about 65% to about 70% decrease, about 70% to about 99% decrease, about 70% to about 95% decrease, about 70% to about 90% decrease, about 70% to about 85% decrease, about 70% to about 80% decrease, about 70% to about 75% decrease, about 75% to about 99% decrease, about 75% to about 95% decrease, about 75% to about 90% decrease, about 75% to about 85% decrease, about 75% to about 80% decrease, about 80% to about 99% decrease, about 80% to about 95% decrease, about 80% to about 90% decrease, about 80% to about 85% decrease, about 85% to about 99% decrease, about 85% to about 95% decrease, about 85% to about 90% decrease, about 90% to about 99% decrease, about 90% to about 95% decrease, or about 95% to about 99% decrease) in one or more (e.g., two, three, four, five, six, seven, eight, nine, or ten) of: the level of interferon-γ in GI tissue, the level of IL-1 in GI tissue, the level of IL-6 in GI tissue, the level of IL-22 in GI tissue, the level of IL-17A in the GI tissue, the level of TNFα in GI tissue, the level of IL-2 in GI tissue, the number of Th memory cells in Peyer's patches, and the number of Th memory cells in mesentery lymph nodes, in a subject (e.g., as compared to the level in the subject prior to treatment or compared to a subject or population of subjects having a similar disease but receiving a placebo or a different treatment) (e.g., for a time period of between about 1 hour to about 30 days (e.g., or any of the subranges herein) following the first administration of an immune modulator using any of the compositions or devices described herein. Exemplary methods for determining the endoscopy score are described herein and other methods for determining the endoscopy score are known in the art. Exemplary methods for determining the levels of interferon-γ, IL-1, IL-6, IL-22, IL-17A, TNFα, and IL-2 are described herein. Additional methods for determining the levels of these cytokines are known in the art. Exemplary methods for determining the number of Th memory cells in Peyer's patches and mesentery lymph nodes are described herein. Additional methods for determining the number of Th memory cells in Peyer's patches and mesentery lymph nodes are known in the art.

[1632] In some examples, treatment can result in an increase (e.g., about 1% to about 500% increase, about 1% to about 400% increase, about 1% to about 300% increase, about 1% to about 200% increase, about 1% to about 150% increase, about 1% to about 100% increase, about 1% to about 90% increase, about 1% to about 80% increase, about 1% to about 70% increase, about 1% to about 60% increase, about 1% to about 50% increase, about 1% to about 40% increase, about 1% to about 30% increase, about 1% to about 20% increase, about 1% to about 10% increase, a 10% to about 500% increase, about 10% to about 400% increase, about 10% to about 300% increase, about 10% to about 200% increase, about 10% to about 150% increase, about 10% to about 100% increase, about 10% to about 90% increase, about 10% to about 80% increase, about 10% to about 70% increase, about 10% to about 60% increase, about 10% to about 50% increase, about 10% to about 40% increase, about 10% to about 30% increase, about 10% to about 20% increase, about 20% to about 500% increase, about 20% to about 400% increase, about 20% to about 300% increase, about 20% to about 200% increase, about 20% to about 150% increase, about 20% to about 100% increase, about 20% to about 90% increase, about 20% to about 80% increase, about 20% to about 70% increase, about 20% to about 60% increase, about 20% to about 50% increase, about 20% to about 40% increase, about 20% to about 30% increase, about 30% to about 500% increase, about 30% to about 400% increase, about 30% to about 300% increase, about 30% to about 200% increase, about 30% to about 150% increase, about 30% to about 100% increase, about 30% to about 90% increase, about 30% to about 80% increase, about 30% to about 70% increase, about 30% to about 60% increase, about 30% to about 50% increase, about 30% to about 40% increase, about 40% to about 500% increase, about 40% to about 400% increase, about 40% to about 300% increase, about 40% to about 200% increase, about 40% to about 150% increase, about 40% to about 100% increase, about 40% to about 90% increase, about 40% to about 80% increase, about 40% to about 70% increase, about 40% to about 60% increase, about 40% to about 50% increase, about 50% to about 500% increase, about 50% to about 400% increase, about 50% to about 300% increase, about 50% to about 200% increase, about 50% to about 150% increase, about 50% to about 100% increase, about 50% to about 90% increase, about 50% to about 80% increase, about 50% to about 70% increase, about 50% to about 60% increase, about 60% to about 500% increase, about 60% to about 400% increase, about 60% to about 300% increase, about 60% to about 200% increase, about 60% to about 150% increase, about 60% to about 100% increase, about 60% to about 90% increase, about 60% to about 80% increase, about 60% to about 70% increase, about 70% to about 500% increase, about 70% to about 400% increase, about 70% to about 300% increase, about 70% to about 200% increase, about 70% to about 150% increase, about 70% to about 100% increase, about 70% to about 90% increase, about 70% to about 80% increase, about 80% to about 500% increase, about 80% to about 400% increase, about 80% to about 300% increase, about 80% to about 200% increase, about 80% to about 150% increase, about 80% to about 100% increase, about 80% to about 90% increase, about 90% to about 500% increase, about 90% to about 400% increase, about 90% to about 300% increase, about 90% to about 200% increase, about 90% to about 150% increase, about 90% to about 100% increase, about 100% to about 500% increase, about 100% to about 400% increase, about 100% to about 300% increase, about 100% to about 200% increase, about 100% to about 150% increase, about 150% to about 500% increase, about 150% to about 400% increase, about 150% to about 300% increase, about 150% to about 200% increase, about 200% to about 500% increase, about 200% to about 400% increase, about 200% to about 300% increase, about 300% to about 500% increase, about 300% to about 400% increase, or about 400% to about 500% increase) in one or both of stool consistency score and weight of a subject (e.g., as compared to the level in the subject prior to treatment or compared to a subject or population of subjects having a similar disease but receiving a placebo or a different treatment) (e.g., for a time period of between about 1 hour to about 30 days (e.g., or any of the subranges herein) following the first administration of an immune modulator using any of the compositions or devices described herein. Exemplary methods for determining stool consistency score are described herein. Additional methods for determining a stool consistency score are known in the art.

[1633] In some embodiments, administration of an immune modulator using any of the devices or compositions described herein can result in a ratio of GI tissue concentration of the immune modulator to the blood, serum, or plasma concentration of the immune modulator that is higher than the same ratio when the immune modulator is administered by traditional means (e.g., systemically or orally). Examples of a ratio of GI tissue concentration of the immune modulator to the blood, serum, or plasma concentration of the immune modulator include about 2 to about 600, about 2 to about 580, about 2 to about 560, about 2 to about 540, about 2 to about 520, about 2 to about 500, about 2 to about 480, about 2 to about 460, about 4 to about 440, about 2 to about 420, about 2 to about 400, about 2 to about 380, about 2 to about 360, about 2 to about 340, about 2 to about 320, about 2 to about 300, about 2 to about 280, about 2 to about 260, about 2 to about 240, about 2 to about 220, about 2 to about 200, about 2 to about 190, about 2 to about 180, about 2 to about 170, about 2 to about 160, about 2 to about 150, about 2 to about 140, about 2 to about 130, about 2 to about 120, about 2 to about 110, about 2 to about 100, about 2 to about 90, about 2 to about 80, about 2 to about 70, about 2 to about 60, about 2 to about 50, about 2 to about 40, about 2 to about 30, about 2 to about 20, about 2 to about 15, about 2 to about 10, about 2 to about 5, about 5 to about 600, about 5 to about 580, about 5 to about 560, about 5 to about 540, about 5 to about 520, about 5 to about 500, about 5 to about 480, about 5 to about 460, about 5 to about 440, about 5 to about 420, about 5 to about 400, about 5 to about 380, about 5 to about 360, about 5 to about 340, about 5 to about 320, about 5 to about 300, about 5 to about 280, about 5 to about 260, about 5 to about 240, about 5 to about 220, about 5 to about 200, about 5 to about 190, about 5 to about 180, about 5 to about 170, about 5 to about 160, about 5 to about 150, about 5 to about 140, about 5 to about 130, about 5 to about 120, about 5 to about 110, about 5 to about 100, about 5 to about 90, about 5 to about 80, about 5 to about 70, about 5 to about 60, about 5 to about 50, about 5 to about 40, about 5 to about 30, about 5 to about 20, about 5 to about 15, about 5 to about 10, about 10 to about 600, about 10 to about 580, about 10 to about 560, about 10 to about 540, about 10 to about 520, about 10 to about 500, about 10 to about 480, about 10 to about 460, about 10 to about 440, about 10 to about 420, about 10 to about 400, about 10 to about 380, about 10 to about 360, about 10 to about 340, about 10 to about 320, about 10 to about 300, about 10 to about 280, about 10 to about 260, about 10 to about 240, about 10 to about 220, about 10 to about 200, about 10 to about 190, about 10 to about 180, about 10 to about 170, about 10 to about 160, about 10 to about 150, about 10 to about 140, about 10 to about 130, about 10 to about 120, about 10 to about 110, about 10 to about 100, about 10 to about 90, about 10 to about 80, about 10 to about 70, about 10 to about 60, about 10 to about 50, about 10 to about 40, about 10 to about 30, about 10 to about 20, about 10 to about 15, about 15 to about 600, about 15 to about 580, about 15 to about 560, about 15 to about 540, about 15 to about 520, about 15 to about 500, about 15 to about 480, about 15 to about 460, about 15 to about 440, about 15 to about 420, about 15 to about 400, about 15 to about 380, about 15 to about 360, about 15 to about 340, about 15 to about 320, about 15 to about 300, about 15 to about 280, about 15 to about 260, about 15 to about 240, about 15 to about 220, about 15 to about 200, about 15 to about 190, about 15 to about 180, about 15 to about 170, about 15 to about 160, about 15 to about 150, about 15 to about 140, about 15 to about 130, about 15 to about 120, about 15 to about 110, about 15 to about 100, about 15 to about 90, about 15 to about 80, about 15 to about 70, about 15 to about 60, about 15 to about 50, about 15 to about 40, about 15 to about 30, about 15 to about 20, about 20 to about 600, about 20 to about 580, about 20 to about 560, about 20 to about 540, about 20 to about 520, about 20 to about 500, about 20 to about 480, about 20 to about 460, about 20 to about 440, about 20 to about 420, about 20 to about 400, about 20 to about 380, about 20 to about 360, about 20 to about 340, about 20 to about 320, about 20 to about 300, about 20 to about 280, about 20 to about 260, about 20 to about 240, about 20 to about 220, about 20 to about 200, about 20 to about 190, about 20 to about 180, about 20 to about 170, about 20 to about 160, about 20 to about 150, about 20 to about 140, about 20 to about 130, about 20 to about 120, about 20 to about 110, about 20 to about 100, about 20 to about 90, about 20 to about 80, about 20 to about 70, about 20 to about 60, about 20 to about 50, about 20 to about 40, about 20 to about 30, about 30 to about 600, about 30 to about 580, about 30 to about 560, about 30 to about 540, about 30 to about 520, about 30 to about 500, about 30 to about 480, about 30 to about 460, about 30 to about 440, about 30 to about 420, about 30 to about 400, about 30 to about 380, about 30 to about 360, about 30 to about 340, about 30 to about 320, about 30 to about 300, about 30 to about 280, about 30 to about 260, about 30 to about 240, about 30 to about 220, about 30 to about 200, about 30 to about 190, about 30 to about 180, about 30 to about 170, about 30 to about 160, about 30 to about 150, about 30 to about 140, about 30 to about 130, about 30 to about 120, about 30 to about 110, about 30 to about 100, about 30 to about 90, about 30 to about 80, about 30 to about 70, about 30 to about 60, about 30 to about 50, about 30 to about 40, about 40 to about 600, about 40 to about 580, about 40 to about 560, about 40 to about 540, about 40 to about 520, about 40 to about 500, about 40 to about 480, about 40 to about 460, about 40 to about 440, about 40 to about 420, about 40 to about 400, about 40 to about 380, about 40 to about 360, about 40 to about 340, about 40 to about 320, about 40 to about 300, about 40 to about 280, about 40 to about 260, about 40 to about 240, about 40 to about 220, about 40 to about 200, about 40 to about 190, about 40 to about 180, about 40 to about 170, about 40 to about 160, about 40 to about 150, about 40 to about 140, about 40 to about 130, about 40 to about 120, about 40 to about 110, about 40 to about 100, about 40 to about 90, about 40 to about 80, about 40 to about 70, about 40 to about 60, about 40 to about 50, about 50 to about 600, about 50 to about 580, about 50 to about 560, about 50 to about 540, about 50 to about 520, about 50 to about 500, about 50 to about 480, about 50 to about 460, about 50 to about 440, about 50 to about 420, about 50 to about 400, about 50 to about 380, about 50 to about 360, about 50 to about 340, about 50 to about 320, about 50 to about 300, about 50 to about 280, about 50 to about 260, about 50 to about 240, about 50 to about 220, about 50 to about 200, about 50 to about 190, about 50 to about 180, about 50 to about 170, about 50 to about 160, about 50 to about 150, about 50 to about 140, about 50 to about 130, about 50 to about 120, about 50 to about 110, about 50 to about 100, about 50 to about 90, about 50 to about 80, about 50 to about 70, about 50 to about 60, about 60 to about 600, about 60 to about 580, about 60 to about 560, about 60 to about 540, about 60 to about 520, about 60 to about 500, about 60 to about 480, about 60 to about 460, about 60 to about 440, about 60 to about 420, about 60 to about 400, about 60 to about 380, about 60 to about 360, about 60 to about 340, about 60 to about 320, about 60 to about 300, about 60 to about 280, about 60 to about 260, about 60 to about 240, about 60 to about 220, about 60 to about 200, about 60 to about 190, about 60 to about 180, about 60 to about 170, about 60 to about 160, about 60 to about 150, about 60 to about 140, about 60 to about 130, about 60 to about 120, about 60 to about 110, about 60 to about 100, about 60 to about 90, about 60 to about 80, about 60 to about 70, about 70 to about 600, about 70 to about 580, about 70 to about 560, about 70 to about 540, about 70 to about 520, about 70 to about 500, about 70 to about 480, about 70 to about 460, about 70 to about 440, about 70 to about 420, about 70 to about 400, about 70 to about 380, about 70 to about 360, about 70 to about 340, about 70 to about 320, about 70 to about 300, about 70 to about 280, about 70 to about 260, about 70 to about 240, about 70 to about 220, about 70 to about 200, about 70 to about 190, about 70 to about 180, about 70 to about 170, about 70 to about 160, about 70 to about 150, about 70 to about 140, about 70 to about 130, about 70 to about 120, about 70 to about 110, about 70 to about 100, about 70 to about 90, about 70 to about 80, about 80 to about 600, about 80 to about 580, about 80 to about 560, about 80 to about 540, about 80 to about 520, about 80 to about 500, about 80 to about 480, about 80 to about 460, about 80 to about 440, about 80 to about 420, about 80 to about 400, about 80 to about 380, about 80 to about 360, about 80 to about 340, about 80 to about 320, about 80 to about 300, about 80 to about 280, about 80 to about 260, about 80 to about 240, about 80 to about 220, about 80 to about 200, about 80 to about 190, about 80 to about 180, about 80 to about 170, about 80 to about 160, about 80 to about 150, about 80 to about 140, about 80 to about 130, about 80 to about 120, about 80 to about 110, about 80 to about 100, about 80 to about 90, about 90 to about 600, about 90 to about 580, about 90 to about 560, about 90 to about 540, about 90 to about 520, about 90 to about 500, about 90 to about 480, about 90 to about 460, about 90 to about 440, about 90 to about 420, about 90 to about 400, about 90 to about 380, about 90 to about 360, about 90 to about 340, about 90 to about 320, about 90 to about 300, about 90 to about 280, about 90 to about 260, about 90 to about 240, about 90 to about 220, about 90 to about 200, about 90 to about 190, about 90 to about 180, about 90 to about 170, about 90 to about 160, about 90 to about 150, about 90 to about 140, about 90 to about 130, about 90 to about 120, about 90 to about 110, about 90 to about 100, about 100 to about 600, about 100 to about 580, about 100 to about 560, about 100 to about 540, about 100 to about 520, about 100 to about 500, about 100 to about 480, about 100 to about 460, about 100 to about 440, about 100 to about 420, about 100 to about 400, about 100 to about 380, about 100 to about 360, about 100 to about 340, about 100 to about 320, about 100 to about 300, about 100 to about 280, about 100 to about 260, about 100 to about 240, about 100 to about 220, about 100 to about 200, about 100 to about 190, about 100 to about 180, about 100 to about 170, about 100 to about 160, about 100 to about 150, about 100 to about 140, about 100 to about 130, about 100 to about 120, about 100 to about 110, about 110 to about 600, about 110 to about 580, about 110 to about 560, about 110 to about 540, about 110 to about 520, about 110 to about 500, about 110 to about 480, about 110 to about 460, about 110 to about 440, about 110 to about 420, about 110 to about 400, about 110 to about 380, about 110 to about 360, about 110 to about 340, about 110 to about 320, about 110 to about 300, about 110 to about 280, about 110 to about 260, about 110 to about 240, about 110 to about 220, about 110 to about 200, about 110 to about 190, about 110 to about 180, about 110 to about 170, about 110 to about 160, about 110 to about 150, about 110 to about 140, about 110 to about 130, about 110 to about 120, about 120 to about 600, about 120 to about 580, about 120 to about 560, about 120 to about 540, about 120 to about 520, about 120 to about 500, about 120 to about 480, about 120 to about 460, about 120 to about 440, about 120 to about 420, about 120 to about 400, about 120 to about 380, about 120 to about 360, about 120 to about 340, about 120 to about 320, about 120 to about 300, about 120 to about 280, about 120 to about 260, about 120 to about 240, about 120 to about 220, about 120 to about 200, about 120 to about 190, about 120 to about 180, about 120 to about 170, about 120 to about 160, about 120 to about 150, about 120 to about 140, about 120 to about 130, about 130 to about 600, about 130 to about 580, about 130 to about 560, about 130 to about 540, about 130 to about 520, about 130 to about 500, about 130 to about 480, about 130 to about 460, about 130 to about 440, about 130 to about 420, about 130 to about 400, about 130 to about 380, about 130 to about 360, about 130 to about 340, about 130 to about 320, about 130 to about 300, about 130 to about 280, about 130 to about 260, about 130 to about 240, about 130 to about 220, about 130 to about 200, about 130 to about 190, about 130 to about 180, about 130 to about 170, about 130 to about 160, about 130 to about 150, about 130 to about 140, about 140 to about 600, about 140 to about 580, about 140 to about 560, about 140 to about 540, about 140 to about 520, about 140 to about 500, about 140 to about 480, about 140 to about 460, about 140 to about 440, about 140 to about 420, about 140 to about 400, about 140 to about 380, about 140 to about 360, about 140 to about 340, about 140 to about 320, about 140 to about 300, about 140 to about 280, about 140 to about 260, about 140 to about 240, about 140 to about 220, about 140 to about 200, about 140 to about 190, about 140 to about 180, about 140 to about 170, about 140 to about 160, about 140 to about 150, about 150 to about 600, about 150 to about 580, about 150 to about 560, about 150 to about 540, about 150 to about 520, about 150 to about 500, about 150 to about 480, about 150 to about 460, about 150 to about 440, about 150 to about 420, about 150 to about 400, about 150 to about 380, about 150 to about 360, about 150 to about 340, about 150 to about 320, about 150 to about 300, about 150 to about 280, about 150 to about 260, about 150 to about 240, about 150 to about 220, about 150 to about 200, about 150 to about 190, about 150 to about 180, about 150 to about 170, about 150 to about 160, about 160 to about 600, about 160 to about 580, about 160 to about 560, about 160 to about 540, about 160 to about 520, about 160 to about 500, about 160 to about 480, about 160 to about 460, about 160 to about 440, about 160 to about 420, about 160 to about 400, about 160 to about 380, about 160 to about 360, about 160 to about 340, about 160 to about 320, about 160 to about 300, about 160 to about 280, about 160 to about 260, about 160 to about 240, about 160 to about 220, about 160 to about 200, about 160 to about 190, about 160 to about 180, about 160 to about 170, about 170 to about 600, about 170 to about 580, about 170 to about 560, about 170 to about 540, about 170 to about 520, about 170 to about 500, about 170 to about 480, about 170 to about 460, about 170 to about 440, about 170 to about 420, about 170 to about 400, about 170 to about 380, about 170 to about 360, about 170 to about 340, about 170 to about 320, about 170 to about 300, about 170 to about 280, about 170 to about 260, about 170 to about 240, about 170 to about 220, about 170 to about 200, about 170 to about 190, about 170 to about 180, about 180 to about 600, about 180 to about 580, about 180 to about 560, about 180 to about 540, about 180 to about 520, about 180 to about 500, about 180 to about 480, about 180 to about 460, about 180 to about 440, about 180 to about 420, about 180 to about 400, about 180 to about 380, about 180 to about 360, about 180 to about 340, about 180 to about 320, about 180 to about 300, about 180 to about 280, about 180 to about 260, about 180 to about 240, about 180 to about 220, about 180 to about 200, about 180 to about 190, about 190 to about 600, about 190 to about 580, about 190 to about 560, about 190 to about 540, about 190 to about 520, about 190 to about 500, about 190 to about 480, about 190 to about 460, about 190 to about 440, about 190 to about 420, about 190 to about 400, about 190 to about 380, about 190 to about 360, about 190 to about 340, about 190 to about 320, about 190 to about 300, about 190 to about 280, about 190 to about 260, about 190 to about 240, about 190 to about 220, about 190 to about 200, about 200 to about 600, about 200 to about 580, about 200 to about 560, about 200 to about 540, about 200 to about 520, about 200 to about 500, about 200 to about 480, about 200 to about 460, about 200 to about 440, about 200 to about 420, about 200 to about 400, about 200 to about 380, about 200 to about 360, about 200 to about 340, about 200 to about 320, about 200 to about 300, about 200 to about 280, about 200 to about 260, about 200 to about 240, about 200 to about 220, about 220 to about 600, about 220 to about 580, about 220 to about 560, about 220 to about 540, about 220 to about 520, about 220 to about 500, about 220 to about 480, about 220 to about 460, about 220 to about 440, about 220 to about 420, about 220 to about 400, about 220 to about 380, about 220 to about 360, about 220 to about 340, about 220 to about 320, about 220 to about 300, about 220 to about 280, about 220 to about 260, about 220 to about 240, about 240 to about 600, about 240 to about 580, about 240 to about 560, about 240 to about 540, about 240 to about 520, about 240 to about 500, about 240 to about 480, about 240 to about 460, about 240 to about 440, about 240 to about 420, about 240 to about 400, about 240 to about 380, about 240 to about 360, about 240 to about 340, about 240 to about 320, about 240 to about 300, about 240 to about 280, about 240 to about 260, about 260 to about 600, about 260 to about 580, about 260 to about 560, about 260 to about 540, about 260 to about 520, about 260 to about 500, about 260 to about 480, about 260 to about 460, about 260 to about 440, about 260 to about 420, about 260 to about 400, about 260 to about 380, about 260 to about 360, about 260 to about 340, about 260 to about 320, about 260 to about 300, about 260 to about 280, about 280 to about 600, about 280 to about 580, about 280 to about 560, about 280 to about 540, about 280 to about 520, about 280 to about 500, about 280 to about 480, about 280 to about 460, about 280 to about 440, about 280 to about 420, about 280 to about 400, about 280 to about 380, about 280 to about 360, about 280 to about 340, about 280 to about 320, about 280 to about 300, about 300 to about 600, about 300 to about 580, about 300 to about 560, about 300 to about 540, about 300 to about 520, about 300 to about 500, about 300 to about 480, about 300 to about 460, about 300 to about 440, about 300 to about 420, about 300 to about 400, about 300 to about 380, about 300 to about 360, about 300 to about 340, about 300 to about 320, about 320 to about 600, about 320 to about 580, about 320 to about 560, about 320 to about 540, about 320 to about 520, about 320 to about 500, about 320 to about 480, about 320 to about 460, about 320 to about 440, about 320 to about 420, about 320 to about 400, about 320 to about 380, about 320 to about 360, about 320 to about 340, about 340 to about 600, about 340 to about 580, about 340 to about 560, about 340 to about 540, about 340 to about 520, about 340 to about 500, about 340 to about 480, about 340 to about 460, about 340 to about 440, about 340 to about 420, about 340 to about 400, about 340 to about 380, about 340 to about 360, about 360 to about 600, about 360 to about 580, about 360 to about 560, about 360 to about 540, about 360 to about 520, about 360 to about 500, about 360 to about 480, about 360 to about 460, about 360 to about 440, about 360 to about 420, about 360 to about 400, about 360 to about 380, about 380 to about 600, about 380 to about 580, about 380 to about 560, about 380 to about 540, about 380 to about 520, about 380 to about 500, about 380 to about 480, about 380 to about 460, about 380 to about 440, about 380 to about 420, about 380 to about 400, about 400 to about 600, about 400 to about 580, about 400 to about 560, about 400 to about 540, about 400 to about 520, about 400 to about 500, about 400 to about 480, about 400 to about 460, about 400 to about 440, about 400 to about 420, about 420 to about 600, about 420 to about 580, about 420 to about 560, about 420 to about 540, about 420 to about 520, about 420 to about 500, about 420 to about 480, about 420 to about 460, about 420 to about 440, about 440 to about 600, about 440 to about 580, about 440 to about 560, about 440 to about 540, about 440 to about 520, about 440 to about 500, about 440 to about 480, about 440 to about 460, about 460 to about 600, about 460 to about 580, about 460 to about 560, about 460 to about 540, about 460 to about 520, about 460 to about 500, about 460 to about 480, about 480 to about 600, about 480 to about 580, about 480 to about 560, about 480 to about 540, about 480 to about 520, about 480 to about 500, about 500 to about 600, about 500 to about 580, about 500 to about 560, about 500 to about 540, about 500 to about 520, about 520 to about 600, about 520 to about 580, about 520 to about 560, about 520 to about 540, about 540 to about 600, about 540 to about 580, about 540 to about 560, about 560 to about 600, about 560 to about 580, or about 580 to about 600.

[1634] Additional examples of a ratio of GI tissue concentration of the immune modulator to the blood, serum, or plasma concentration of the immune modulator include to 1.1 to 600, 1.2 to 600, 1.3 to 600, 1.4 to 600, 1.5 to 600, 1.6 to 600, 1.7 to 600, 1.8 to 600, or 1.9 to 600, such as 1.1, 1.2, 1.3, 1.4, 1.5, 1.6, 1.7, 1.8, or 1.9.

[1635] In some examples, administration of an immune modulator using any of the devices or compositions described herein can result in a ratio of GI tissue concentration of the immune modulator to the blood, serum, or plasma concentration of the immune modulator of, e.g., about 2.8 to about 6.0, about 2.8 to about 5.8, about 2.8 to about 5.6, about 2.8 to about 5.4, about 2.8 to about 5.2, about 2.8 to about 5.0, about 2.8 to about 4.8, about 2.8 to about 4.6, about 2.8 to about 4.4, about 2.8 to about 4.2, about 2.8 to about 4.0, about 2.8 to about 3.8, about 2.8 to about 3.6, about 2.8 to about 3.4, about 2.8 to about 3.2, about 2.8 to about 3.0, about 3.0 to about 6.0, about 3.0 to about 5.8, about 3.0 to about 5.6, about 3.0 to about 5.4, about 3.0 to about 5.2, about 3.0 to about 5.0, about 3.0 to about 4.8, about 3.0 to about 4.6, about 3.0 to about 4.4, about 3.0 to about 4.2, about 3.0 to about 4.0, about 3.0 to about 3.8, about 3.0 to about 3.6, about 3.0 to about 3.4, about 3.0 to about 3.2, about 3.2 to about 6.0, about 3.2 to about 5.8, about 3.2 to about 5.6, about 3.2 to about 5.4, about 3.2 to about 5.2, about 3.2 to about 5.0, about 3.2 to about 4.8, about 3.2 to about 4.6, about 3.2 to about 4.4, about 3.2 to about 4.2, about 3.2 to about 4.0, about 3.2 to about 3.8, about 3.2 to about 3.6, about 3.2 to about 3.4, about 3.4 to about 6.0, about 3.4 to about 5.8, about 3.4 to about 5.6, about 3.4 to about 5.4, about 3.4 to about 5.2, about 3.4 to about 5.0, about 3.4 to about 4.8, about 3.4 to about 4.6, about 3.4 to about 4.4, about 3.4 to about 4.2, about 3.4 to about 4.0, about 3.4 to about 3.8, about 3.4 to about 3.6, about 3.6 to about 6.0, about 3.6 to about 5.8, about 3.6 to about 5.6, about 3.6 to about 5.4, about 3.6 to about 5.2, about 3.6 to about 5.0, about 3.6 to about 4.8, about 3.6 to about 4.6, about 3.6 to about 4.4, about 3.6 to about 4.2, about 3.6 to about 4.0, about 3.6 to about 3.8, about 3.8 to about 6.0, about 3.8 to about 5.8, about 3.8 to about 5.6, about 3.8 to about 5.4, about 3.8 to about 5.2, about 3.8 to about 5.0, about 3.8 to about 4.8, about 3.8 to about 4.6, about 3.8 to about 4.4, about 3.8 to about 4.2, about 3.8 to about 4.0, about 4.0 to about 6.0, about 4.0 to about 5.8, about 4.0 to about 5.6, about 4.0 to about 5.4, about 4.0 to about 5.2, about 4.0 to about 5.0, about 4.0 to about 4.8, about 4.0 to about 4.6, about 4.0 to about 4.4, about 4.0 to about 4.2, about 4.2 to about 6.0, about 4.2 to about 5.8, about 4.2 to about 5.6, about 4.2 to about 5.4, about 4.2 to about 5.2, about 4.2 to about 5.0, about 4.2 to about 4.8, about 4.2 to about 4.6, about 4.2 to about 4.4, about 4.4 to about 6.0, about 4.4 to about 5.8, about 4.4 to about 5.6, about 4.4 to about 5.4, about 4.4 to about 5.2, about 4.4 to about 5.0, about 4.4 to about 4.8, about 4.4 to about 4.6, about 4.6 to about 6.0, about 4.6 to about 5.8, about 4.6 to about 5.6, about 4.6 to about 5.4, about 4.6 to about 5.2, about 4.6 to about 5.0, about 4.6 to about 4.8, about 4.8 to about 6.0, about 4.8 to about 5.8, about 4.8 to about 5.6, about 4.8 to about 5.4, about 4.8 to about 5.2, about 4.8 to about 5.0, about 5.0 to about 6.0, about 5.0 to about 5.8, about 5.0 to about 5.6, about 5.0 to about 5.4, about 5.0 to about 5.2, about 5.2 to about 6.0, about 5.2 to about 5.8, about 5.2 to about 5.6, about 5.2 to about 5.4, about 5.4 to about 6.0, about 5.4 to about 5.8, about 5.4 to about 5.6, about 5.6 to about 6.0, about 5.6 to about 5.8, or about 5.8 to about 6.0. Accordingly, in some embodiments, a method of treatment disclosed herein can include determining the ratio of the level of the immune modulator in the GI tissue to the level of the immune modulator inhibitor in the blood, serum, or plasma of a subject at substantially the same time point following administration of the device is about 2.8 to about 6.0. Exemplary methods for measuring the concentration of an immune modulator in the plasma or the GI tissue of a subject are described herein. Additional methods for measuring the concentration of an immune modulator in the plasma or the GI tissue of a subject are known in the art.

[1636] Accordingly, in some embodiments, a method of treatment disclosed herein includes determining the level of the immune modulator in the GI tissue (e.g., one or more of any of the exemplary GI tissues described herein). In some embodiments, a method of treatment disclosed herein can include determining the level of immune modulator in one or more (e.g., two, three, or four) of the lumen/superficial mucosa, the lamina propria, the submucosa, and the tunica muscularis/serosa.

[1637] In some embodiments, a method of treatment disclosed herein includes determining that the level of the immune modulator in the GI tissue (e.g., one or more of any of the exemplary types of GI tissue described herein) at a time point following administration of the device is higher than the level of the immune modulator in the GI tissue at substantially the same time point following systemic administration of an equal amount of the immune modulator. In some embodiments, a method of treatment disclosed herein can include determining that the level of the immune modulator in one or more (e.g., two, three, or four) of the lumen/superficial mucosa, the lamina propria, the submucosa, and the tunica muscularis/serosa at a time point following administration of the device is higher than the level of the immune modulator in one or more (e.g., two, three, or four) of the lumen/superficial mucosa, the lamina propria, the submucosa, and the tunica muscularis/serosa at substantially the same time point following systemic administration of an equal amount of the immune modulator.

[1638] In some embodiments, a method of treatment disclosed herein includes determining the level of immune modulator in the feces of the subject. In some embodiments, a method of treatment disclosed herein includes determining the level of immune modulator in the GI tissue, e.g., in one or more (e.g., two, three, or four) of the lumen/superficial mucosa, the lamina propria, the submucosa, and the tunica muscularis/serosa within a time period of about 10 minutes to about 10 hours following administration of the device.

[1639] In some embodiments, a method of treatment as disclosed herein comprises determining the level of the immune modulator at the location of release following administration of the device.

[1640] In some embodiments, a method of treatment as disclosed herein comprises determining that the level of immune modulator at the location of release at the time point following administration of the device is higher than the level of the immune modulator at the same location of release at substantially the same time point following systemic administration of an equal amount of the immune modulator.

[1641] In some embodiments, a method of treatment as disclosed herein comprises determining the level of the immune modulator in the tissue of the subject within a time period of about 10 minutes to 10 hours following administration of the device.

[1642] Some examples of any of the methods described herein can, e.g., result in a selective suppression of a local inflammatory response (e.g., suppression in the local lymphatic system, for example, in the mesenteric lymph nodes), while maintaining the systemic immune response (e.g., blood).

[1643] FAs used herein, “GI content” refers to the content of the gastrointestinal (GI) tract, such as the content of one or more of duodenum, jejunum, ileum, cecum, ascending colon, transverse colon, descending colon, sigmoid colon, and rectum, more particularly of the proximal portion of one or more of duodenum, jejunum, ileum, cecum, ascending colon, transverse colon, descending colon, and sigmoid colon, or of the distal portion of one or more of duodenum, jejunum, ileum, cecum, ascending colon, transverse colon, descending colon, and sigmoid colon.

[1644] In some examples, the methods described herein can result in a 1% increase to 500% increase (e.g., a 1% increase to 450% increase, a 1% increase to 400% increase, a 1% increase to 350% increase, a 1% increase to 300% increase, a 1% increase to 250% increase, a 1% increase to 200% increase, a 1% increase to 190% increase, a 1% increase to 180% increase, a 1% increase to 170% increase, a 1% increase to 160% increase, a 1% increase to 150% increase, a 1% increase to 140% increase, a 1% increase to 130% increase, a 1% increase to 120% increase, a 1% increase to 110% increase, a 1% increase to 100% increase, a 1% increase to 90% increase, a 1% increase to 80% increase, a 1% increase to 70% increase, a 1% increase to 60% increase, a 1% increase to 50% increase, a 1% increase to 40% increase, a 1% increase to 30% increase, a 1% increase to 25% increase, a 1% increase to 20% increase, a 1% increase to 15% increase, a 1% increase to 10% increase, a 1% increase to 5% increase, a 5% increase to 500% increase, a 5% increase to 450% increase, a 5% increase to 400% increase, a 5% increase to 350% increase, a 5% increase to 300% increase, a 5% increase to 250% increase, a 5% increase to 200% increase, a 5% increase to 190% increase, a 5% increase to 180% increase, a 5% increase to 170% increase, a 5% increase to 160% increase, a 5% increase to 150% increase, a 5% increase to 140% increase, a 5% increase to 130% increase, a 5% increase to 120% increase, a 5% increase to 110% increase, a 5% increase to 100% increase, a 5% increase to 90% increase, a 5% increase to 80% increase, a 5% increase to 70% increase, a 5% increase to 60% increase, a 5% increase to 50% increase, a 5% increase to 40% increase, a 5% increase to 30% increase, a 5% increase to 25% increase, a 5% increase to 20% increase, a 5% increase to 15% increase, a 5% increase to 10% increase, a 10% increase to 500% increase, a 10% increase to 450% increase, a 10% increase to 400% increase, a 10% increase to 350% increase, a 10% increase to 300% increase, a 10% increase to 250% increase, a 10% increase to 200% increase, a 10% increase to 190% increase, a 10% increase to 180% increase, a 10% increase to 170% increase, a 10% increase to 160% increase, a 10% increase to 150% increase, a 10% increase to 140% increase, a 10% increase to 130% increase, a 10% increase to 120% increase, a 10% increase to 110% increase, a 10% increase to 100% increase, a 10% increase to 90% increase, a 10% increase to 80% increase, a 10% increase to 70% increase, a 10% increase to 60% increase, a 10% increase to 50% increase, a 10% increase to 40% increase, a 10% increase to 30% increase, a 10% increase to 25% increase, a 10% increase to 20% increase, a 10% increase to 15% increase, a 15% increase to 500% increase, a 15% increase to 450% increase, a 15% increase to 400% increase, a 15% increase to 350% increase, a 15% increase to 300% increase, a 15% increase to 250% increase, a 15% increase to 200% increase, a 15% increase to 190% increase, a 15% increase to 180% increase, a 15% increase to 170% increase, a 15% increase to 160% increase, a 15% increase to 150% increase, a 15% increase to 140% increase, a 15% increase to 130% increase, a 15% increase to 120% increase, a 15% increase to 110% increase, a 15% increase to 100% increase, a 15% increase to 90% increase, a 15% increase to 80% increase, a 15% increase to 70% increase, a 15% increase to 60% increase, a 15% increase to 50% increase, a 15% increase to 40% increase, a 15% increase to 30% increase, a 15% increase to 25% increase, a 15% increase to 20% increase, a 20% increase to 500% increase, a 20% increase to 450% increase, a 20% increase to 400% increase, a 20% increase to 350% increase, a 20% increase to 300% increase, a 20% increase to 250% increase, a 20% increase to 200% increase, a 20% increase to 190% increase, a 20% increase to 180% increase, a 20% increase to 170% increase, a 20% increase to 160% increase, a 20% increase to 150% increase, a 20% increase to 140% increase, a 20% increase to 130% increase, a 20% increase to 120% increase, a 20% increase to 110% increase, a 20% increase to 100% increase, a 20% increase to 90% increase, a 20% increase to 80% increase, a 20% increase to 70% increase, a 20% increase to 60% increase, a 20% increase to 50% increase, a 20% increase to 40% increase, a 20% increase to 30% increase, a 20% increase to 25% increase, a 25% increase to 500% increase, a 25% increase to 450% increase, a 25% increase to 400% increase, a 25% increase to 350% increase, a 25% increase to 300% increase, a 25% increase to 250% increase, a 25% increase to 200% increase, a 25% increase to 190% increase, a 25% increase to 180% increase, a 25% increase to 170% increase, a 25% increase to 160% increase, a 25% increase to 150% increase, a 25% increase to 140% increase, a 25% increase to 130% increase, a 25% increase to 120% increase, a 25% increase to 110% increase, a 25% increase to 100% increase, a 25% increase to 90% increase, a 25% increase to 80% increase, a 25% increase to 70% increase, a 25% increase to 60% increase, a 25% increase to 50% increase, a 25% increase to 40% increase, a 25% increase to 30% increase, a 30% increase to 500% increase, a 30% increase to 450% increase, a 30% increase to 400% increase, a 30% increase to 350% increase, a 30% increase to 300% increase, a 30% increase to 250% increase, a 30% increase to 200% increase, a 30% increase to 190% increase, a 30% increase to 180% increase, a 30% increase to 170% increase, a 30% increase to 160% increase, a 30% increase to 150% increase, a 30% increase to 140% increase, a 30% increase to 130% increase, a 30% increase to 120% increase, a 30% increase to 110% increase, a 30% increase to 100% increase, a 30% increase to 90% increase, a 30% increase to 80% increase, a 30% increase to 70% increase, a 30% increase to 60% increase, a 30% increase to 50% increase, a 30% increase to 40% increase, a 40% increase to 500% increase, a 40% increase to 450% increase, a 40% increase to 400% increase, a 40% increase to 350% increase, a 40% increase to 300% increase, a 40% increase to 250% increase, a 40% increase to 200% increase, a 40% increase to 190% increase, a 40% increase to 180% increase, a 40% increase to 170% increase, a 40% increase to 160% increase, a 40% increase to 150% increase, a 40% increase to 140% increase, a 40% increase to 130% increase, a 40% increase to 120% increase, a 40% increase to 110% increase, a 40% increase to 100% increase, a 40% increase to 90% increase, a 40% increase to 80% increase, a 40% increase to 70% increase, a 40% increase to 60% increase, a 40% increase to 50% increase, a 50% increase to 500% increase, a 50% increase to 450% increase, a 50% increase to 400% increase, a 50% increase to 350% increase, a 50% increase to 300% increase, a 50% increase to 250% increase, a 50% increase to 200% increase, a 50% increase to 190% increase, a 50% increase to 180% increase, a 50% increase to 170% increase, a 50% increase to 160% increase, a 50% increase to 150% increase, a 50% increase to 140% increase, a 50% increase to 130% increase, a 50% increase to 120% increase, a 50% increase to 110% increase, a 50% increase to 100% increase, a 50% increase to 90% increase, a 50% increase to 80% increase, a 50% increase to 70% increase, a 50% increase to 60% increase, a 60% increase to 500% increase, a 60% increase to 450% increase, a 60% increase to 400% increase, a 60% increase to 350% increase, a 60% increase to 300% increase, a 60% increase to 250% increase, a 60% increase to 200% increase, a 60% increase to 190% increase, a 60% increase to 180% increase, a 60% increase to 170% increase, a 60% increase to 160% increase, a 60% increase to 150% increase, a 60% increase to 140% increase, a 60% increase to 130% increase, a 60% increase to 120% increase, a 60% increase to 110% increase, a 60% increase to 100% increase, a 60% increase to 90% increase, a 60% increase to 80% increase, a 60% increase to 70% increase, a 70% increase to 500% increase, a 70% increase to 450% increase, a 70% increase to 400% increase, a 70% increase to 350% increase, a 70% increase to 300% increase, a 70% increase to 250% increase, a 70% increase to 200% increase, a 70% increase to 190% increase, a 70% increase to 180% increase, a 70% increase to 170% increase, a 70% increase to 160% increase, a 70% increase to 150% increase, a 70% increase to 140% increase, a 70% increase to 130% increase, a 70% increase to 120% increase, a 70% increase to 110% increase, a 70% increase to 100% increase, a 70% increase to 90% increase, a 70% increase to 80% increase, a 80% increase to 500% increase, a 80% increase to 450% increase, a 80% increase to 400% increase, a 80% increase to 350% increase, a 80% increase to 300% increase, a 80% increase to 250% increase, a 80% increase to 200% increase, a 80% increase to 190% increase, a 80% increase to 180% increase, a 80% increase to 170% increase, a 80% increase to 160% increase, a 80% increase to 150% increase, a 80% increase to 140% increase, a 80% increase to 130% increase, a 80% increase to 120% increase, a 80% increase to 110% increase, a 80% increase to 100% increase, a 80% increase to 90% increase, a 90% increase to 500% increase, a 90% increase to 450% increase, a 90% increase to 400% increase, a 90% increase to 350% increase, a 90% increase to 300% increase, a 90% increase to 250% increase, a 90% increase to 200% increase, a 90% increase to 190% increase, a 90% increase to 180% increase, a 90% increase to 170% increase, a 90% increase to 160% increase, a 90% increase to 150% increase, a 90% increase to 140% increase, a 90% increase to 130% increase, a 90% increase to 120% increase, a 90% increase to 110% increase, a 90% increase to 100% increase, a 100% increase to 500% increase, a 100% increase to 450% increase, a 100% increase to 400% increase, a 100% increase to 350% increase, a 100% increase to 300% increase, a 100% increase to 250% increase, a 100% increase to 200% increase, a 100% increase to 190% increase, a 100% increase to 180% increase, a 100% increase to 170% increase, a 100% increase to 160% increase, a 100% increase to 150% increase, a 100% increase to 140% increase, a 100% increase to 130% increase, a 100% increase to 120% increase, a 100% increase to 110% increase, a 110% increase to 500% increase, a 110% increase to 450% increase, a 110% increase to 400% increase, a 110% increase to 350% increase, a 110% increase to 300% increase, a 110% increase to 250% increase, a 110% increase to 200% increase, a 110% increase to 190% increase, a 110% increase to 180% increase, a 110% increase to 170% increase, a 110% increase to 160% increase, a 110% increase to 150% increase, a 110% increase to 140% increase, a 110% increase to 130% increase, a 110% increase to 120% increase, a 120% increase to 500% increase, a 120% increase to 450% increase, a 120% increase to 400% increase, a 120% increase to 350% increase, a 120% increase to 300% increase, a 120% increase to 250% increase, a 120% increase to 200% increase, a 120% increase to 190% increase, a 120% increase to 180% increase, a 120% increase to 170% increase, a 120% increase to 160% increase, a 120% increase to 150% increase, a 120% increase to 140% increase, a 120% increase to 130% increase, a 130% increase to 500% increase, a 130% increase to 450% increase, a 130% increase to 400% increase, a 130% increase to 350% increase, a 130% increase to 300% increase, a 130% increase to 250% increase, a 130% increase to 200% increase, a 130% increase to 190% increase, a 130% increase to 180% increase, a 130% increase to 170% increase, a 130% increase to 160% increase, a 130% increase to 150% increase, a 130% increase to 140% increase, a 140% increase to 500% increase, a 140% increase to 450% increase, a 140% increase to 400% increase, a 140% increase to 350% increase, a 140% increase to 300% increase, a 140% increase to 250% increase, a 140% increase to 200% increase, a 140% increase to 190% increase, a 140% increase to 180% increase, a 140% increase to 170% increase, a 140% increase to 160% increase, a 140% increase to 150% increase, a 150% increase to 500% increase, a 150% increase to 450% increase, a 150% increase to 400% increase, a 150% increase to 350% increase, a 150% increase to 300% increase, a 150% increase to 250% increase, a 150% increase to 200% increase, a 150% increase to 190% increase, a 150% increase to 180% increase, a 150% increase to 170% increase, a 150% increase to 160% increase, a 160% increase to 500% increase, a 160% increase to 450% increase, a 160% increase to 400% increase, a 160% increase to 350% increase, a 160% increase to 300% increase, a 160% increase to 250% increase, a 160% increase to 200% increase, a 160% increase to 190% increase, a 160% increase to 180% increase, a 160% increase to 170% increase, a 170% increase to 500% increase, a 170% increase to 450% increase, a 170% increase to 400% increase, a 170% increase to 350% increase, a 170% increase to 300% increase, a 170% increase to 250% increase, a 170% increase to 200% increase, a 170% increase to 190% increase, a 170% increase to 180% increase, a 180% increase to 500% increase, a 180% increase to 450% increase, a 180% increase to 400% increase, a 180% increase to 350% increase, a 180% increase to 300% increase, a 180% increase to 250% increase, a 180% increase to 200% increase, a 180% increase to 190% increase, a 190% increase to 500% increase, a 190% increase to 450% increase, a 190% increase to 400% increase, a 190% increase to 350% increase, a 190% increase to 300% increase, a 190% increase to 250% increase, a 190% increase to 200% increase, a 200% increase to 500% increase, a 200% increase to 450% increase, a 200% increase to 400% increase, a 200% increase to 350% increase, a 200% increase to 300% increase, a 200% increase to 250% increase, a 250% increase to 500% increase, a 250% increase to 450% increase, a 250% increase to 400% increase, a 250% increase to 350% increase, a 250% increase to 300% increase, a 300% increase to 500% increase, a 300% increase to 450% increase, a 300% increase to 400% increase, a 300% increase to 350% increase, a 350% increase to 500% increase, a 350% increase to 450% increase, a 350% increase to 400% increase, a 400% increase to 500% increase, a 400% increase to 450% increase, or a 450% increase to 500% increase) in one or more (e.g., two, three, four, five, six, seven, eight, nine, or ten) of: the plasma, serum, or blood level of IL-6; the plasma, serum, or blood level of IL-2; the plasma, serum, or blood level of IL-Iβ; the plasma, serum, or blood level of TNFα; the plasma, serum, or blood level of IL-17A; the plasma, serum, or blood level of IL-22; the plasma, serum, or blood level of interferon-γ; the level of blood Th memory cells (CD44⁺CD45RB⁻CD4⁺ cells); the level of α4β7 expression in blood cells, and the level of α4β7 expression in Th memory cells (CD44⁺CD45RB⁻CD4⁺ cells) in mesenteric lymph nodes, e.g., each as compared to the corresponding level in a subject systemically administered the same dose of the same immune modulator. Methods for determining the plasma, serum, or blood level of IL-6; the plasma, serum, or blood level of IL-2; the plasma, serum, or blood level of IL-1β; the plasma, serum, or blood level of TNFα; the plasma, serum, or blood level of IL-17A; the plasma, serum, or blood level of IL-22; the plasma, serum, or blood level of interferon-γ; the level of blood Th memory cells (CD44⁺CD45RB⁻CD4⁺ cells); and the level of α4β7 expression in blood cells; and the level of α4β7 expression in blood cells are known in the art.

[1645] In some examples, the methods described herein can result in a 1% decrease to 99% decrease (e.g., a 1% decrease to 95% decrease, a 1% decrease to 90% decrease, a 1% decrease to 85% decrease, a 1% decrease to 80% decrease, a 1% decrease to 75% decrease, a 1% decrease to 70% decrease, a 1% decrease to 65% decrease, a 1% decrease to 60% decrease, a 1% decrease to 55% decrease, a 1% decrease to 50% decrease, a 1% decrease to 45% decrease, a 1% decrease to 40% decrease, a 1% decrease to 35% decrease, a 1% decrease to 30% decrease, a 1% decrease to 25% decrease, a 1% decrease to 20% decrease, a 1% decrease to 15% decrease, a 1% decrease to 10% decrease, a 1% decrease to 5% decrease, a 5% decrease to 99% decrease, a 5% decrease to 95% decrease, a 5% decrease to 90% decrease, a 5% decrease to 85% decrease, a 5% decrease to 80% decrease, a 5% decrease to 75% decrease, a 5% decrease to 70% decrease, a 5% decrease to 65% decrease, a 5% decrease to 60% decrease, a 5% decrease to 55% decrease, a 5% decrease to 50% decrease, a 5% decrease to 45% decrease, a 5% decrease to 40% decrease, a 5% decrease to 35% decrease, a 5% decrease to 30% decrease, a 5% decrease to 25% decrease, a 5% decrease to 20% decrease, a 5% decrease to 15% decrease, a 5% decrease to 10% decrease, a 10% decrease to 99% decrease, a 10% decrease to 95% decrease, a 10% decrease to 90% decrease, a 10% decrease to 85% decrease, a 10% decrease to 80% decrease, a 10% decrease to 75% decrease, a 10% decrease to 70% decrease, a 10% decrease to 65% decrease, a 10% decrease to 60% decrease, a 10% decrease to 55% decrease, a 10% decrease to 50% decrease, a 10% decrease to 45% decrease, a 10% decrease to 40% decrease, a 10% decrease to 35% decrease, a 10% decrease to 30% decrease, a 10% decrease to 25% decrease, a 10% decrease to 20% decrease, a 10% decrease to 15% decrease, a 15% decrease to 99% decrease, a 15% decrease to 95% decrease, a 15% decrease to 90% decrease, a 15% decrease to 85% decrease, a 15% decrease to 80% decrease, a 15% decrease to 75% decrease, a 15% decrease to 70% decrease, a 15% decrease to 65% decrease, a 15% decrease to 60% decrease, a 15% decrease to 55% decrease, a 15% decrease to 50% decrease, a 15% decrease to 45% decrease, a 15% decrease to 40% decrease, a 15% decrease to 35% decrease, a 15% decrease to 30% decrease, a 15% decrease to 25% decrease, a 15% decrease to 20% decrease, a 20% decrease to 99% decrease, a 20% decrease to 95% decrease, a 20% decrease to 90% decrease, a 20% decrease to 85% decrease, a 20% decrease to 80% decrease, a 20% decrease to 75% decrease, a 20% decrease to 70% decrease, a 20% decrease to 65% decrease, a 20% decrease to 60% decrease, a 20% decrease to 55% decrease, a 20% decrease to 50% decrease, a 20% decrease to 45% decrease, a 20% decrease to 40% decrease, a 20% decrease to 35% decrease, a 20% decrease to 30% decrease, a 20% decrease to 25% decrease, a 25% decrease to 99% decrease, a 25% decrease to 95% decrease, a 25% decrease to 90% decrease, a 25% decrease to 85% decrease, a 25% decrease to 80% decrease, a 25% decrease to 75% decrease, a 25% decrease to 70% decrease, a 25% decrease to 65% decrease, a 25% decrease to 60% decrease, a 25% decrease to 55% decrease, a 25% decrease to 50% decrease, a 25% decrease to 45% decrease, a 25% decrease to 40% decrease, a 25% decrease to 35% decrease, a 25% decrease to 30% decrease, a 30% decrease to 99% decrease, a 30% decrease to 95% decrease, a 30% decrease to 90% decrease, a 30% decrease to 85% decrease, a 30% decrease to 80% decrease, a 30% decrease to 75% decrease, a 30% decrease to 70% decrease, a 30% decrease to 65% decrease, a 30% decrease to 60% decrease, a 30% decrease to 55% decrease, a 30% decrease to 50% decrease, a 30% decrease to 45% decrease, a 30% decrease to 40% decrease, a 30% decrease to 35% decrease, a 35% decrease to 99% decrease, a 35% decrease to 95% decrease, a 35% decrease to 90% decrease, a 35% decrease to 85% decrease, a 35% decrease to 80% decrease, a 35% decrease to 75% decrease, a 35% decrease to 70% decrease, a 35% decrease to 65% decrease, a 35% decrease to 60% decrease, a 35% decrease to 55% decrease, a 35% decrease to 50% decrease, a 35% decrease to 45% decrease, a 35% decrease to 40% decrease, a 40% decrease to 99% decrease, a 40% decrease to 95% decrease, a 40% decrease to 90% decrease, a 40% decrease to 85% decrease, a 40% decrease to 80% decrease, a 40% decrease to 75% decrease, a 40% decrease to 70% decrease, a 40% decrease to 65% decrease, a 40% decrease to 60% decrease, a 40% decrease to 55% decrease, a 40% decrease to 50% decrease, a 40% decrease to 45% decrease, a 45% decrease to 99% decrease, a 45% decrease to 95% decrease, a 45% decrease to 90% decrease, a 45% decrease to 85% decrease, a 45% decrease to 80% decrease, a 45% decrease to 75% decrease, a 45% decrease to 70% decrease, a 45% decrease to 65% decrease, a 45% decrease to 60% decrease, a 45% decrease to 55% decrease, a 45% decrease to 50% decrease, a 50% decrease to 99% decrease, a 50% decrease to 95% decrease, a 50% decrease to 90% decrease, a 50% decrease to 85% decrease, a 50% decrease to 80% decrease, a 50% decrease to 75% decrease, a 50% decrease to 70% decrease, a 50% decrease to 65% decrease, a 50% decrease to 60% decrease, a 50% decrease to 55% decrease, a 55% decrease to 99% decrease, a 55% decrease to 95% decrease, a 55% decrease to 90% decrease, a 55% decrease to 85% decrease, a 55% decrease to 80% decrease, a 55% decrease to 75% decrease, a 55% decrease to 70% decrease, a 55% decrease to 65% decrease, a 55% decrease to 60% decrease, a 60% decrease to 99% decrease, a 60% decrease to 95% decrease, a 60% decrease to 90% decrease, a 60% decrease to 85% decrease, a 60% decrease to 80% decrease, a 60% decrease to 75% decrease, a 60% decrease to 70% decrease, a 60% decrease to 65% decrease, a 65% decrease to 99% decrease, a 65% decrease to 95% decrease, a 65% decrease to 90% decrease, a 65% decrease to 85% decrease, a 65% decrease to 80% decrease, a 65% decrease to 75% decrease, a 65% decrease to 70% decrease, a 70% decrease to 99% decrease, a 70% decrease to 95% decrease, a 70% decrease to 90% decrease, a 70% decrease to 85% decrease, a 70% decrease to 80% decrease, a 70% decrease to 75% decrease, a 75% decrease to 99% decrease, a 75% decrease to 95% decrease, a 75% decrease to 90% decrease, a 75% decrease to 85% decrease, a 75% decrease to 80% decrease, a 80% decrease to 99% decrease, a 80% decrease to 95% decrease, a 80% decrease to 90% decrease, a 80% decrease to 85% decrease, a 85% decrease to 99% decrease, a 85% decrease to 95% decrease, a 85% decrease to 90% decrease, a 90% decrease to 99% decrease, a 90% decrease to 95% decrease, or a 95% decrease to 99% decrease) in the the level of Th memory cells (CD44⁺CD45RB⁻CD4⁺ cells) in mesenteric lymph nodes and/or the level of Th memory cells in Peyer's patches, e.g., as compared to the corresponding level in a subject systemically administered the same dose of the immune modulator. Methods for determining the level of Th memory cells (CD44⁺CD45RB⁻CD4⁺ cells) in Peyer's patches, and the level of Th memory cells (CD44⁺CD45RB⁻CD4⁺ cells) in mesenteric lymph nodes are known in the art.

[1646] In some embodiments, the immune modulator is delivered to the location by a process that does not comprise systemic transport of the immune modulator.

[1647] In some embodiments, the amount of the immune modulator that is administered is from about 1 mg to about 650 mg. In some embodiments, the amount of immune modulator that is administered is from about 1 mg to about 600 mg. In some embodiments, the amount of the immune modulator that is administered is from about 1 mg to about 500 mg. In some embodiments, the amount of the immune modulator that is administered is from about 1 mg to about 100 mg. In some embodiments, the amount of the immune modulator that is administered is from about 5 mg to about 40 mg. In some embodiments, the amount of the immune modulator inhibitor is administered as an escalating dose of 10 mg, followed by 20 mg, followed by 30 mg; or an escalating dose of 20 mg, followed by 30 mg, followed by 50 mg.

[1648] In some embodiments, the amount of the immune modulator inhibitor is administered in a dose of, e.g., about 1 mg to about 300 mg, about 1 mg to about 250 mg, about 1 mg to about 200 mg, about 1 mg to about 195 mg, about 1 mg to about 190 mg, about 1 mg to about 185 mg, about 1 mg to about 180 mg, about 1 mg to about 175 mg, about 1 mg to about 170 mg, about 1 mg to about 165 mg, about 1 mg to about 160 mg, about 1 mg to about 155 mg, about 1 mg to about 150 mg, about 1 mg to about 145 mg, about 1 mg to about 140 mg, about 1 mg to about 135 mg, about 1 mg to about 130 mg, about 1 mg to about 125 mg, about 1 mg to about 120 mg, about 1 mg to about 115 mg, about 1 mg to about 110 mg, about 1 mg to about 105 mg, about 1 mg to about 100 mg, about 1 mg to about 95 mg, about 1 mg to about 90 mg, about 1 mg to about 85 mg, about 1 mg to about 80 mg, about 1 mg to about 75 mg, about 1 mg to about 70 mg, about 1 mg to about 65 mg, about 1 mg to about 60 mg, about 1 mg to about 55 mg, about 1 mg to about 50 mg, about 1 mg to about 45 mg, about 1 mg to about 40 mg, about 1 mg to about 35 mg, about 1 mg to about 30 mg, about 1 mg to about 25 mg, about 1 mg to about 20 mg, about 1 mg to about 15 mg, about 1 mg to about 10 mg, about 1 mg to about 5 mg, about 5 mg to about 200 mg, about 5 mg to about 195 mg, about 5 mg to about 190 mg, about 5 mg to about 185 mg, about 5 mg to about 180 mg, about 5 mg to about 175 mg, about 5 mg to about 170 mg, about 5 mg to about 165 mg, about 5 mg to about 160 mg, about 5 mg to about 155 mg, about 5 mg to about 150 mg, about 5 mg to about 145 mg, about 5 mg to about 140 mg, about 5 mg to about 135 mg, about 5 mg to about 130 mg, about 5 mg to about 125 mg, about 5 mg to about 120 mg, about 5 mg to about 115 mg, about 5 mg to about 110 mg, about 5 mg to about 105 mg, about 5 mg to about 100 mg, about 5 mg to about 95 mg, about 5 mg to about 90 mg, about 5 mg to about 85 mg, about 5 mg to about 80 mg, about 5 mg to about 75 mg, about 5 mg to about 70 mg, about 5 mg to about 65 mg, about 5 mg to about 60 mg, about 5 mg to about 55 mg, about 5 mg to about 50 mg, about 5 mg to about 45 mg, about 5 mg to about 40 mg, about 5 mg to about 35 mg, about 5 mg to about 30 mg, about 5 mg to about 25 mg, about 5 mg to about 20 mg, about 5 mg to about 15 mg, about 5 mg to about 10 mg, about 10 mg to about 200 mg, about 10 mg to about 195 mg, about 10 mg to about 190 mg, about 10 mg to about 185 mg, about 10 mg to about 180 mg, about 10 mg to about 175 mg, about 10 mg to about 170 mg, about 10 mg to about 165 mg, about 10 mg to about 160 mg, about 10 mg to about 155 mg, about 10 mg to about 150 mg, about 10 mg to about 145 mg, about 10 mg to about 140 mg, about 10 mg to about 135 mg, about 10 mg to about 130 mg, about 10 mg to about 125 mg, about 10 mg to about 120 mg, about 10 mg to about 115 mg, about 10 mg to about 110 mg, about 10 mg to about 105 mg, about 10 mg to about 100 mg, about 10 mg to about 95 mg, about 10 mg to about 90 mg, about 10 mg to about 85 mg, about 10 mg to about 80 mg, about 10 mg to about 75 mg, about 10 mg to about 70 mg, about 10 mg to about 65 mg, about 10 mg to about 60 mg, about 10 mg to about 55 mg, about 10 mg to about 50 mg, about 10 mg to about 45 mg, about 10 mg to about 40 mg, about 10 mg to about 35 mg, about 10 mg to about 30 mg, about 10 mg to about 25 mg, about 10 mg to about 20 mg, about 10 mg to about 15 mg, about 15 mg to about 200 mg, about 15 mg to about 195 mg, about 15 mg to about 190 mg, about 15 mg to about 185 mg, about 15 mg to about 180 mg, about 15 mg to about 175 mg, about 15 mg to about 170 mg, about 15 mg to about 165 mg, about 15 mg to about 160 mg, about 15 mg to about 155 mg, about 15 mg to about 150 mg, about 15 mg to about 145 mg, about 15 mg to about 140 mg, about 15 mg to about 135 mg, about 15 mg to about 130 mg, about 15 mg to about 125 mg, about 15 mg to about 120 mg, about 15 mg to about 115 mg, about 15 mg to about 110 mg, about 15 mg to about 105 mg, about 15 mg to about 100 mg, about 15 mg to about 95 mg, about 15 mg to about 90 mg, about 15 mg to about 85 mg, about 15 mg to about 80 mg, about 15 mg to about 75 mg, about 15 mg to about 70 mg, about 15 mg to about 65 mg, about 15 mg to about 60 mg, about 15 mg to about 55 mg, about 15 mg to about 50 mg, about 15 mg to about 45 mg, about 15 mg to about 40 mg, about 15 mg to about 35 mg, about 15 mg to about 30 mg, about 15 mg to about 25 mg, about 15 mg to about 20 mg, about 20 mg to about 200 mg, about 20 mg to about 195 mg, about 20 mg to about 190 mg, about 20 mg to about 185 mg, about 20 mg to about 180 mg, about 20 mg to about 175 mg, about 20 mg to about 170 mg, about 20 mg to about 165 mg, about 20 mg to about 160 mg, about 20 mg to about 155 mg, about 20 mg to about 150 mg, about 20 mg to about 145 mg, about 20 mg to about 140 mg, about 20 mg to about 135 mg, about 20 mg to about 130 mg, about 20 mg to about 125 mg, about 20 mg to about 120 mg, about 20 mg to about 115 mg, about 20 mg to about 110 mg, about 20 mg to about 105 mg, about 20 mg to about 100 mg, about 20 mg to about 95 mg, about 20 mg to about 90 mg, about 20 mg to about 85 mg, about 20 mg to about 80 mg, about 20 mg to about 75 mg, about 20 mg to about 70 mg, about 20 mg to about 65 mg, about 20 mg to about 60 mg, about 20 mg to about 55 mg, about 20 mg to about 50 mg, about 20 mg to about 45 mg, about 20 mg to about 40 mg, about 20 mg to about 35 mg, about 20 mg to about 30 mg, about 20 mg to about 25 mg, about 25 mg to about 200 mg, about 25 mg to about 195 mg, about 25 mg to about 190 mg, about 25 mg to about 185 mg, about 25 mg to about 180 mg, about 25 mg to about 175 mg, about 25 mg to about 170 mg, about 25 mg to about 165 mg, about 25 mg to about 160 mg, about 25 mg to about 155 mg, about 25 mg to about 150 mg, about 25 mg to about 145 mg, about 25 mg to about 140 mg, about 25 mg to about 135 mg, about 25 mg to about 130 mg, about 25 mg to about 125 mg, about 25 mg to about 120 mg, about 25 mg to about 115 mg, about 25 mg to about 110 mg, about 25 mg to about 105 mg, about 25 mg to about 100 mg, about 25 mg to about 95 mg, about 25 mg to about 90 mg, about 25 mg to about 85 mg, about 25 mg to about 80 mg, about 25 mg to about 75 mg, about 25 mg to about 70 mg, about 25 mg to about 65 mg, about 25 mg to about 60 mg, about 25 mg to about 55 mg, about 25 mg to about 50 mg, about 25 mg to about 45 mg, about 25 mg to about 40 mg, about 25 mg to about 35 mg, about 25 mg to about 30 mg, about 30 mg to about 200 mg, about 30 mg to about 195 mg, about 30 mg to about 190 mg, about 30 mg to about 185 mg, about 30 mg to about 180 mg, about 30 mg to about 175 mg, about 30 mg to about 170 mg, about 30 mg to about 165 mg, about 30 mg to about 160 mg, about 30 mg to about 155 mg, about 30 mg to about 150 mg, about 30 mg to about 145 mg, about 30 mg to about 140 mg, about 30 mg to about 135 mg, about 30 mg to about 130 mg, about 30 mg to about 125 mg, about 30 mg to about 120 mg, about 30 mg to about 115 mg, about 30 mg to about 110 mg, about 30 mg to about 105 mg, about 30 mg to about 100 mg, about 30 mg to about 95 mg, about 30 mg to about 90 mg, about 30 mg to about 85 mg, about 30 mg to about 80 mg, about 30 mg to about 75 mg, about 30 mg to about 70 mg, about 30 mg to about 65 mg, about 30 mg to about 60 mg, about 30 mg to about 55 mg, about 30 mg to about 50 mg, about 30 mg to about 45 mg, about 30 mg to about 40 mg, about 30 mg to about 35 mg, about 35 mg to about 200 mg, about 35 mg to about 195 mg, about 35 mg to about 190 mg, about 35 mg to about 185 mg, about 35 mg to about 180 mg, about 35 mg to about 175 mg, about 35 mg to about 170 mg, about 35 mg to about 165 mg, about 35 mg to about 160 mg, about 35 mg to about 155 mg, about 35 mg to about 150 mg, about 35 mg to about 145 mg, about 35 mg to about 140 mg, about 35 mg to about 135 mg, about 35 mg to about 130 mg, about 35 mg to about 125 mg, about 35 mg to about 120 mg, about 35 mg to about 115 mg, about 35 mg to about 110 mg, about 35 mg to about 105 mg, about 35 mg to about 100 mg, about 35 mg to about 95 mg, about 35 mg to about 90 mg, about 35 mg to about 85 mg, about 35 mg to about 80 mg, about 35 mg to about 75 mg, about 35 mg to about 70 mg, about 35 mg to about 65 mg, about 35 mg to about 60 mg, about 35 mg to about 55 mg, about 35 mg to about 50 mg, about 35 mg to about 45 mg, about 35 mg to about 40 mg, about 40 mg to about 200 mg, about 40 mg to about 195 mg, about 40 mg to about 190 mg, about 40 mg to about 185 mg, about 40 mg to about 180 mg, about 40 mg to about 175 mg, about 40 mg to about 170 mg, about 40 mg to about 165 mg, about 40 mg to about 160 mg, about 40 mg to about 155 mg, about 40 mg to about 150 mg, about 40 mg to about 145 mg, about 40 mg to about 140 mg, about 40 mg to about 135 mg, about 40 mg to about 130 mg, about 40 mg to about 125 mg, about 40 mg to about 120 mg, about 40 mg to about 115 mg, about 40 mg to about 110 mg, about 40 mg to about 105 mg, about 40 mg to about 100 mg, about 40 mg to about 95 mg, about 40 mg to about 90 mg, about 40 mg to about 85 mg, about 40 mg to about 80 mg, about 40 mg to about 75 mg, about 40 mg to about 70 mg, about 40 mg to about 65 mg, about 40 mg to about 60 mg, about 40 mg to about 55 mg, about 40 mg to about 50 mg, about 40 mg to about 45 mg, about 45 mg to about 200 mg, about 45 mg to about 195 mg, about 45 mg to about 190 mg, about 45 mg to about 185 mg, about 45 mg to about 180 mg, about 45 mg to about 175 mg, about 45 mg to about 170 mg, about 45 mg to about 165 mg, about 45 mg to about 160 mg, about 45 mg to about 155 mg, about 45 mg to about 150 mg, about 45 mg to about 145 mg, about 45 mg to about 140 mg, about 45 mg to about 135 mg, about 45 mg to about 130 mg, about 45 mg to about 125 mg, about 45 mg to about 120 mg, about 45 mg to about 115 mg, about 45 mg to about 110 mg, about 45 mg to about 105 mg, about 45 mg to about 100 mg, about 45 mg to about 95 mg, about 45 mg to about 90 mg, about 45 mg to about 85 mg, about 45 mg to about 80 mg, about 45 mg to about 75 mg, about 45 mg to about 70 mg, about 45 mg to about 65 mg, about 45 mg to about 60 mg, about 45 mg to about 55 mg, about 45 mg to about 50 mg, about 50 mg to about 200 mg, about 50 mg to about 195 mg, about 50 mg to about 190 mg, about 50 mg to about 185 mg, about 50 mg to about 180 mg, about 50 mg to about 175 mg, about 50 mg to about 170 mg, about 50 mg to about 165 mg, about 50 mg to about 160 mg, about 50 mg to about 155 mg, about 50 mg to about 150 mg, about 50 mg to about 145 mg, about 50 mg to about 140 mg, about 50 mg to about 135 mg, about 50 mg to about 130 mg, about 50 mg to about 125 mg, about 50 mg to about 120 mg, about 50 mg to about 115 mg, about 50 mg to about 110 mg, about 50 mg to about 105 mg, about 50 mg to about 100 mg, about 50 mg to about 95 mg, about 50 mg to about 90 mg, about 50 mg to about 85 mg, about 50 mg to about 80 mg, about 50 mg to about 75 mg, about 50 mg to about 70 mg, about 50 mg to about 65 mg, about 50 mg to about 60 mg, about 50 mg to about 55 mg, about 55 mg to about 200 mg, about 55 mg to about 195 mg, about 55 mg to about 190 mg, about 55 mg to about 185 mg, about 55 mg to about 180 mg, about 55 mg to about 175 mg, about 55 mg to about 170 mg, about 55 mg to about 165 mg, about 55 mg to about 160 mg, about 55 mg to about 155 mg, about 55 mg to about 150 mg, about 55 mg to about 145 mg, about 55 mg to about 140 mg, about 55 mg to about 135 mg, about 55 mg to about 130 mg, about 55 mg to about 125 mg, about 55 mg to about 120 mg, about 55 mg to about 115 mg, about 55 mg to about 110 mg, about 55 mg to about 105 mg, about 55 mg to about 100 mg, about 55 mg to about 95 mg, about 55 mg to about 90 mg, about 55 mg to about 85 mg, about 55 mg to about 80 mg, about 55 mg to about 75 mg, about 55 mg to about 70 mg, about 55 mg to about 65 mg, about 55 mg to about 60 mg, about 60 mg to about 200 mg, about 60 mg to about 195 mg, about 60 mg to about 190 mg, about 60 mg to about 185 mg, about 60 mg to about 180 mg, about 60 mg to about 175 mg, about 60 mg to about 170 mg, about 60 mg to about 165 mg, about 60 mg to about 160 mg, about 60 mg to about 155 mg, about 60 mg to about 150 mg, about 60 mg to about 145 mg, about 60 mg to about 140 mg, about 60 mg to about 135 mg, about 60 mg to about 130 mg, about 60 mg to about 125 mg, about 60 mg to about 120 mg, about 60 mg to about 115 mg, about 60 mg to about 110 mg, about 60 mg to about 105 mg, about 60 mg to about 100 mg, about 60 mg to about 95 mg, about 60 mg to about 90 mg, about 60 mg to about 85 mg, about 60 mg to about 80 mg, about 60 mg to about 75 mg, about 60 mg to about 70 mg, about 60 mg to about 65 mg, about 65 mg to about 200 mg, about 65 mg to about 195 mg, about 65 mg to about 190 mg, about 65 mg to about 185 mg, about 65 mg to about 180 mg, about 65 mg to about 175 mg, about 65 mg to about 170 mg, about 65 mg to about 165 mg, about 65 mg to about 160 mg, about 65 mg to about 155 mg, about 65 mg to about 150 mg, about 65 mg to about 145 mg, about 65 mg to about 140 mg, about 65 mg to about 135 mg, about 65 mg to about 130 mg, about 65 mg to about 125 mg, about 65 mg to about 120 mg, about 65 mg to about 115 mg, about 65 mg to about 110 mg, about 65 mg to about 105 mg, about 65 mg to about 100 mg, about 65 mg to about 95 mg, about 65 mg to about 90 mg, about 65 mg to about 85 mg, about 65 mg to about 80 mg, about 65 mg to about 75 mg, about 65 mg to about 70 mg, about 70 mg to about 200 mg, about 70 mg to about 195 mg, about 70 mg to about 190 mg, about 70 mg to about 185 mg, about 70 mg to about 180 mg, about 70 mg to about 175 mg, about 70 mg to about 170 mg, about 70 mg to about 165 mg, about 70 mg to about 160 mg, about 70 mg to about 155 mg, about 70 mg to about 150 mg, about 70 mg to about 145 mg, about 70 mg to about 140 mg, about 70 mg to about 135 mg, about 70 mg to about 130 mg, about 70 mg to about 125 mg, about 70 mg to about 120 mg, about 70 mg to about 115 mg, about 70 mg to about 110 mg, about 70 mg to about 105 mg, about 70 mg to about 100 mg, about 70 mg to about 95 mg, about 70 mg to about 90 mg, about 70 mg to about 85 mg, about 70 mg to about 80 mg, about 70 mg to about 75 mg, about 75 mg to about 200 mg, about 75 mg to about 195 mg, about 75 mg to about 190 mg, about 75 mg to about 185 mg, about 75 mg to about 180 mg, about 75 mg to about 175 mg, about 75 mg to about 170 mg, about 75 mg to about 165 mg, about 75 mg to about 160 mg, about 75 mg to about 155 mg, about 75 mg to about 150 mg, about 75 mg to about 145 mg, about 75 mg to about 140 mg, about 75 mg to about 135 mg, about 75 mg to about 130 mg, about 75 mg to about 125 mg, about 75 mg to about 120 mg, about 75 mg to about 115 mg, about 75 mg to about 110 mg, about 75 mg to about 105 mg, about 75 mg to about 100 mg, about 75 mg to about 95 mg, about 75 mg to about 90 mg, about 75 mg to about 85 mg, about 75 mg to about 80 mg, about 80 mg to about 200 mg, about 80 mg to about 195 mg, about 80 mg to about 190 mg, about 80 mg to about 185 mg, about 80 mg to about 180 mg, about 80 mg to about 175 mg, about 80 mg to about 170 mg, about 80 mg to about 165 mg, about 80 mg to about 160 mg, about 80 mg to about 155 mg, about 80 mg to about 150 mg, about 80 mg to about 145 mg, about 80 mg to about 140 mg, about 80 mg to about 135 mg, about 80 mg to about 130 mg, about 80 mg to about 125 mg, about 80 mg to about 120 mg, about 80 mg to about 115 mg, about 80 mg to about 110 mg, about 80 mg to about 105 mg, about 80 mg to about 100 mg, about 80 mg to about 95 mg, about 80 mg to about 90 mg, about 80 mg to about 85 mg, about 85 mg to about 200 mg, about 85 mg to about 195 mg, about 85 mg to about 190 mg, about 85 mg to about 185 mg, about 85 mg to about 180 mg, about 85 mg to about 175 mg, about 85 mg to about 170 mg, about 85 mg to about 165 mg, about 85 mg to about 160 mg, about 85 mg to about 155 mg, about 85 mg to about 150 mg, about 85 mg to about 145 mg, about 85 mg to about 140 mg, about 85 mg to about 135 mg, about 85 mg to about 130 mg, about 85 mg to about 125 mg, about 85 mg to about 120 mg, about 85 mg to about 115 mg, about 85 mg to about 110 mg, about 85 mg to about 105 mg, about 85 mg to about 100 mg, about 85 mg to about 95 mg, about 85 mg to about 90 mg, about 90 mg to about 200 mg, about 90 mg to about 195 mg, about 90 mg to about 190 mg, about 90 mg to about 185 mg, about 90 mg to about 180 mg, about 90 mg to about 175 mg, about 90 mg to about 170 mg, about 90 mg to about 165 mg, about 90 mg to about 160 mg, about 90 mg to about 155 mg, about 90 mg to about 150 mg, about 90 mg to about 145 mg, about 90 mg to about 140 mg, about 90 mg to about 135 mg, about 90 mg to about 130 mg, about 90 mg to about 125 mg, about 90 mg to about 120 mg, about 90 mg to about 115 mg, about 90 mg to about 110 mg, about 90 mg to about 105 mg, about 90 mg to about 100 mg, about 90 mg to about 95 mg, about 95 mg to about 200 mg, about 95 mg to about 195 mg, about 95 mg to about 190 mg, about 95 mg to about 185 mg, about 95 mg to about 180 mg, about 95 mg to about 175 mg, about 95 mg to about 170 mg, about 95 mg to about 165 mg, about 95 mg to about 160 mg, about 95 mg to about 155 mg, about 95 mg to about 150 mg, about 95 mg to about 145 mg, about 95 mg to about 140 mg, about 95 mg to about 135 mg, about 95 mg to about 130 mg, about 95 mg to about 125 mg, about 95 mg to about 120 mg, about 95 mg to about 115 mg, about 95 mg to about 110 mg, about 95 mg to about 105 mg, about 95 mg to about 100 mg, about 100 mg to about 200 mg, about 100 mg to about 195 mg, about 100 mg to about 190 mg, about 100 mg to about 185 mg, about 100 mg to about 180 mg, about 100 mg to about 175 mg, about 100 mg to about 170 mg, about 100 mg to about 165 mg, about 100 mg to about 160 mg, about 100 mg to about 155 mg, about 100 mg to about 150 mg, about 100 mg to about 145 mg, about 100 mg to about 140 mg, about 100 mg to about 135 mg, about 100 mg to about 130 mg, about 100 mg to about 125 mg, about 100 mg to about 120 mg, about 100 mg to about 115 mg, about 100 mg to about 110 mg, about 100 mg to about 105 mg, about 105 mg to about 200 mg, about 105 mg to about 195 mg, about 105 mg to about 190 mg, about 105 mg to about 185 mg, about 105 mg to about 180 mg, about 105 mg to about 175 mg, about 105 mg to about 170 mg, about 105 mg to about 165 mg, about 105 mg to about 160 mg, about 105 mg to about 155 mg, about 105 mg to about 150 mg, about 105 mg to about 145 mg, about 105 mg to about 140 mg, about 105 mg to about 135 mg, about 105 mg to about 130 mg, about 105 mg to about 125 mg, about 105 mg to about 120 mg, about 105 mg to about 115 mg, about 105 mg to about 110 mg, about 110 mg to about 200 mg, about 110 mg to about 195 mg, about 110 mg to about 190 mg, about 110 mg to about 185 mg, about 110 mg to about 180 mg, about 110 mg to about 175 mg, about 110 mg to about 170 mg, about 110 mg to about 165 mg, about 110 mg to about 160 mg, about 110 mg to about 155 mg, about 110 mg to about 150 mg, about 110 mg to about 145 mg, about 110 mg to about 140 mg, about 110 mg to about 135 mg, about 110 mg to about 130 mg, about 110 mg to about 125 mg, about 110 mg to about 120 mg, about 110 mg to about 115 mg, about 115 mg to about 200 mg, about 115 mg to about 195 mg, about 115 mg to about 190 mg, about 115 mg to about 185 mg, about 115 mg to about 180 mg, about 115 mg to about 175 mg, about 115 mg to about 170 mg, about 115 mg to about 165 mg, about 115 mg to about 160 mg, about 115 mg to about 155 mg, about 115 mg to about 150 mg, about 115 mg to about 145 mg, about 115 mg to about 140 mg, about 115 mg to about 135 mg, about 115 mg to about 130 mg, about 115 mg to about 125 mg, about 115 mg to about 120 mg, about 120 mg to about 200 mg, about 120 mg to about 195 mg, about 120 mg to about 190 mg, about 120 mg to about 185 mg, about 120 mg to about 180 mg, about 120 mg to about 175 mg, about 120 mg to about 170 mg, about 120 mg to about 165 mg, about 120 mg to about 160 mg, about 120 mg to about 155 mg, about 120 mg to about 150 mg, about 120 mg to about 145 mg, about 120 mg to about 140 mg, about 120 mg to about 135 mg, about 120 mg to about 130 mg, about 120 mg to about 125 mg, about 125 mg to about 200 mg, about 125 mg to about 195 mg, about 125 mg to about 190 mg, about 125 mg to about 185 mg, about 125 mg to about 180 mg, about 125 mg to about 175 mg, about 125 mg to about 170 mg, about 125 mg to about 165 mg, about 125 mg to about 160 mg, about 125 mg to about 155 mg, about 125 mg to about 150 mg, about 125 mg to about 145 mg, about 125 mg to about 140 mg, about 125 mg to about 135 mg, about 125 mg to about 130 mg, about 130 mg to about 200 mg, about 130 mg to about 195 mg, about 130 mg to about 190 mg, about 130 mg to about 185 mg, about 130 mg to about 180 mg, about 130 mg to about 175 mg, about 130 mg to about 170 mg, about 130 mg to about 165 mg, about 130 mg to about 160 mg, about 130 mg to about 155 mg, about 130 mg to about 150 mg, about 130 mg to about 145 mg, about 130 mg to about 140 mg, about 130 mg to about 135 mg, about 135 mg to about 200 mg, about 135 mg to about 195 mg, about 135 mg to about 190 mg, about 135 mg to about 185 mg, about 135 mg to about 180 mg, about 135 mg to about 175 mg, about 135 mg to about 170 mg, about 135 mg to about 165 mg, about 135 mg to about 160 mg, about 135 mg to about 155 mg, about 135 mg to about 150 mg, about 135 mg to about 145 mg, about 135 mg to about 140 mg, about 140 mg to about 200 mg, about 140 mg to about 195 mg, about 140 mg to about 190 mg, about 140 mg to about 185 mg, about 140 mg to about 180 mg, about 140 mg to about 175 mg, about 140 mg to about 170 mg, about 140 mg to about 165 mg, about 140 mg to about 160 mg, about 140 mg to about 155 mg, about 140 mg to about 150 mg, about 140 mg to about 145 mg, about 145 mg to about 200 mg, about 145 mg to about 195 mg, about 145 mg to about 190 mg, about 145 mg to about 185 mg, about 145 mg to about 180 mg, about 145 mg to about 175 mg, about 145 mg to about 170 mg, about 145 mg to about 165 mg, about 145 mg to about 160 mg, about 145 mg to about 155 mg, about 145 mg to about 150 mg, about 150 mg to about 200 mg, about 150 mg to about 195 mg, about 150 mg to about 190 mg, about 150 mg to about 185 mg, about 150 mg to about 180 mg, about 150 mg to about 175 mg, about 150 mg to about 170 mg, about 150 mg to about 165 mg, about 150 mg to about 160 mg, about 150 mg to about 155 mg, about 155 mg to about 200 mg, about 155 mg to about 195 mg, about 155 mg to about 190 mg, about 155 mg to about 185 mg, about 155 mg to about 180 mg, about 155 mg to about 175 mg, about 155 mg to about 170 mg, about 155 mg to about 165 mg, about 155 mg to about 160 mg, about 160 mg to about 200 mg, about 160 mg to about 195 mg, about 160 mg to about 190 mg, about 160 mg to about 185 mg, about 160 mg to about 180 mg, about 160 mg to about 175 mg, about 160 mg to about 170 mg, about 160 mg to about 165 mg, about 165 mg to about 200 mg, about 165 mg to about 195 mg, about 165 mg to about 190 mg, about 165 mg to about 185 mg, about 165 mg to about 180 mg, about 165 mg to about 175 mg, about 165 mg to about 170 mg, about 170 mg to about 200 mg, about 170 mg to about 195 mg, about 170 mg to about 190 mg, about 170 mg to about 185 mg, about 170 mg to about 180 mg, about 170 mg to about 175 mg, about 175 mg to about 200 mg, about 175 mg to about 195 mg, about 175 mg to about 190 mg, about 175 mg to about 185 mg, about 175 mg to about 180 mg, about 180 mg to about 200 mg, about 180 mg to about 195 mg, about 180 mg to about 190 mg, about 180 mg to about 185 mg, about 185 mg to about 200 mg, about 185 mg to about 195 mg, about 185 mg to about 190 mg, about 190 mg to about 200 mg, about 190 mg to about 195 mg, or about 195 mg to about 200 mg.

[1649] In some embodiments, the amount of the immune modulator that is administered is less than an amount that is effective when the immune modulator is delivered systemically.

[1650] In some embodiments, the amount of the immune modulator that is administered is an induction dose. In some embodiments, such induction dose is effective to induce remission of the TNF and cytokine storm and healing of acute inflammation and lesions. In some embodiments, the induction dose is administered once a day. In some embodiments of any of the methods described herein, the induction dose is administered once every two days. In some embodiments, the induction dose is administered once every three days. In some embodiments, the induction dose is administered once a week. In some embodiments, the induction dose is administered once a day, once every three days, or once a week, over a period of about 6-8 weeks.

[1651] In some embodiments, the method comprises administering (i) an amount of the immune modulator that is an induction dose, and (ii) an amount of the immune modulator that is a maintenance dose, in this order. In some embodiments, step (ii) is repeated one or more times. In some embodiments, the induction dose is equal to the maintenance dose. In some embodiments, the induction dose is greater than the maintenance dose. In some embodiments, the induction dose is five times greater than the maintenance dose. In some embodiments, the induction dose is two times greater than the maintenance dose.

[1652] In some embodiments, the induction dose is the same as or higher than an induction dose administered systemically for treatment of the same disorder to a subject. In more particular embodiments, the induction dose is the same as or higher than an induction dose administered systemically for treatment of the same disorder to a subject, and the maintenance dose is lower than the maintenance dose administered systemically for treatment of the same disorder to a subject. In some embodiments, the induction dose is the same as or higher than an induction dose administered systemically for treatment of the same disorder to a subject, and the maintenance dose is higher than the maintenance dose administered systemically for treatment of the same disorder to a subject.

[1653] In some embodiments an induction dose of the immune modulator and a maintenance dose of immune modulator are each administered to the subject by administering a pharmaceutical composition comprising a therapeutically effective amount of the immune modulator, wherein the pharmaceutical composition is a device. In some embodiments an induction dose of immune modulator is administered to the subject in a different manner from the maintenance dose. As an example, the induction dose may be administered systemically. In some embodiments, the induction dose may be administered other than orally. As an example, the induction dose may be administered rectally. As an example, the induction dose may be administered intravenously. As an example, the induction dose may be administered subcutaneously. In some embodiments, the induction dose may be administered by spray catheter.

[1654] In some embodiments, the concentration of the immune modulator delivered at the location in the gastrointestinal tract is 10%, 25%, 50%, 75%, 100%, 200%, 300%, 400%, 500%, 1000%, 2000% greater than the concentration of the immune modulator in plasma.

[1655] In some embodiments, the method provides a concentration of the immune modulator at a location that is the intended site of release is 2-100 times greater than the concentration at a location that is not the intended site of release in the GI tract.

[1656] In some embodiments, the method comprises delivering the immune modulator at the location in the gastrointestinal tract as a single bolus.

[1657] In some embodiments, the method comprises delivering the immune modulator at the location in the gastrointestinal tract as more than one bolus.

[1658] In some embodiments, the method comprises delivering the immune modulator at the location in the gastrointestinal tract in a continuous manner.

[1659] In some embodiments, the method comprises delivering the immune modulator at the location in the gastrointestinal tract over a time period of 20 or more minutes.

[1660] In some embodiments, the method provides a concentration of the immune modulator in the plasma of the subject that is less than 10 pg/ml. In some embodiments, the method provides a concentration of the immune modulator in the plasma of the subject that is less than 3 pg/ml. In some embodiments, the method provides a concentration of the immune modulator in the plasma of the subject that is less than 1 pg/ml. In some embodiments, the method provides a concentration of the immune modulator in the plasma of the subject that is less than 0.3 pg/ml. In some embodiments, the method provides a concentration of the immune modulator in the plasma of the subject that is less than 0.1 pg/ml. In some embodiments, the method provides a concentration of the immune modulator in the plasma of the subject that is less than 0.01 pg/ml. In some embodiments, the values of the concentration of the immune modulator in the plasma of the subject provided herein refer to C_{trough}, that is, the lowest value of the concentration prior to administration of the next dose.

[1661] In some embodiments, the method provides a concentration of the immune modulator inhibitor in the plasma of the subject that is, e.g., about 1 ng/L to about 100 ng/mL, about 1 ng/mL to about 95 ng/mL, about 1 ng/mL to about 90 ng/mL, about 1 ng/mL to about 85 ng/mL, about 1 ng/mL to about 80 ng/mL, about 1 ng/mL to about 75 ng/mL, about 1 ng/mL to about 70 ng/mL, about 1 ng/mL to about 65 ng/mL, about 1 ng/mL to about 60 ng/mL, about 1 ng/mL to about 55 ng/mL, about 1 ng/mL to about 50 ng/mL, about 1 ng/mL to about 45 ng/mL, about 1 ng/mL to about 40 ng/mL, about 1 ng/mL to about 35 ng/mL, about 1 ng/mL to about 30 ng/mL, about 1 ng/mL to about 25 ng/mL, about 1 ng/mL to about 20 ng/mL, about 1 ng/mL to about 15 ng/mL, about 1 ng/mL to about 10 ng/mL, about 1 ng/mL to about 5 ng/mL, about 2 ng/L to about 100 ng/mL, about 2 ng/mL to about 95 ng/mL, about 2 ng/mL to about 90 ng/mL, about 2 ng/mL to about 85 ng/mL, about 2 ng/mL to about 80 ng/mL, about 2 ng/mL to about 75 ng/mL, about 2 ng/mL to about 70 ng/mL, about 2 ng/mL to about 65 ng/mL, about 2 ng/mL to about 60 ng/mL, about 2 ng/mL to about 55 ng/mL, about 2 ng/mL to about 50 ng/mL, about 2 ng/mL to about 45 ng/mL, about 2 ng/mL to about 40 ng/mL, about 2 ng/mL to about 35 ng/mL, about 2 ng/mL to about 30 ng/mL, about 2 ng/mL to about 25 ng/mL, about 2 ng/mL to about 20 ng/mL, about 2 ng/mL to about 15 ng/mL, about 2 ng/mL to about 10 ng/mL, about 2 ng/mL to about 5 ng/mL, about 5 ng/L to about 100 ng/mL, about 5 ng/mL to about 95 ng/mL, about 5 ng/mL to about 90 ng/mL, about 5 ng/mL to about 85 ng/mL, about 5 ng/mL to about 80 ng/mL, about 5 ng/mL to about 75 ng/mL, about 5 ng/mL to about 70 ng/mL, about 5 ng/mL to about 65 ng/mL, about 5 ng/mL to about 60 ng/mL, about 5 ng/mL to about 55 ng/mL, about 5 ng/mL to about 50 ng/mL, about 5 ng/mL to about 45 ng/mL, about 5 ng/mL to about 40 ng/mL, about 5 ng/mL to about 35 ng/mL, about 5 ng/mL to about 30 ng/mL, about 5 ng/mL to about 25 ng/mL, about 5 ng/mL to about 20 ng/mL, about 5 ng/mL to about 15 ng/mL, about 5 ng/mL to about 10 ng/mL, about 10 ng/L to about 100 ng/mL, about 10 ng/mL to about 95 ng/mL, about 10 ng/mL to about 90 ng/mL, about 10 ng/mL to about 85 ng/mL, about 10 ng/mL to about 80 ng/mL, about 10 ng/mL to about 75 ng/mL, about 10 ng/mL to about 70 ng/mL, about 10 ng/mL to about 65 ng/mL, about 10 ng/mL to about 60 ng/mL, about 10 ng/mL to about 55 ng/mL, about 10 ng/mL to about 50 ng/mL, about 10 ng/mL to about 45 ng/mL, about 10 ng/mL to about 40 ng/mL, about 10 ng/mL to about 35 ng/mL, about 10 ng/mL to about 30 ng/mL, about 10 ng/mL to about 25 ng/mL, about 10 ng/mL to about 20 ng/mL, about 10 ng/mL to about 15 ng/mL, about 15 ng/L to about 100 ng/mL, about 15 ng/mL to about 95 ng/mL, about 15 ng/mL to about 90 ng/mL, about 15 ng/mL to about 85 ng/mL, about 15 ng/mL to about 80 ng/mL, about 15 ng/mL to about 75 ng/mL, about 15 ng/mL to about 70 ng/mL, about 15 ng/mL to about 65 ng/mL, about 15 ng/mL to about 60 ng/mL, about 15 ng/mL to about 55 ng/mL, about 15 ng/mL to about 50 ng/mL, about 15 ng/mL to about 45 ng/mL, about 15 ng/mL to about 40 ng/mL, about 15 ng/mL to about 35 ng/mL, about 15 ng/mL to about 30 ng/mL, about 15 ng/mL to about 25 ng/mL, about 15 ng/mL to about 20 ng/mL, about 20 ng/L to about 100 ng/mL, about 20 ng/mL to about 95 ng/mL, about 20 ng/mL to about 90 ng/mL, about 20 ng/mL to about 85 ng/mL, about 20 ng/mL to about 80 ng/mL, about 20 ng/mL to about 75 ng/mL, about 20 ng/mL to about 70 ng/mL, about 20 ng/mL to about 65 ng/mL, about 20 ng/mL to about 60 ng/mL, about 20 ng/mL to about 55 ng/mL, about 20 ng/mL to about 50 ng/mL, about 20 ng/mL to about 45 ng/mL, about 20 ng/mL to about 40 ng/mL, about 20 ng/mL to about 35 ng/mL, about 20 ng/mL to about 30 ng/mL, about 20 ng/mL to about 25 ng/mL, about 25 ng/L to about 100 ng/mL, about 25 ng/mL to about 95 ng/mL, about 25 ng/mL to about 90 ng/mL, about 25 ng/mL to about 85 ng/mL, about 25 ng/mL to about 80 ng/mL, about 25 ng/mL to about 75 ng/mL, about 25 ng/mL to about 70 ng/mL, about 25 ng/mL to about 65 ng/mL, about 25 ng/mL to about 60 ng/mL, about 25 ng/mL to about 55 ng/mL, about 25 ng/mL to about 50 ng/mL, about 25 ng/mL to about 45 ng/mL, about 25 ng/mL to about 40 ng/mL, about 25 ng/mL to about 35 ng/mL, about 25 ng/mL to about 30 ng/mL, about 30 ng/L to about 100 ng/mL, about 30 ng/mL to about 95 ng/mL, about 30 ng/mL to about 90 ng/mL, about 30 ng/mL to about 85 ng/mL, about 30 ng/mL to about 80 ng/mL, about 30 ng/mL to about 75 ng/mL, about 30 ng/mL to about 70 ng/mL, about 30 ng/mL to about 65 ng/mL, about 30 ng/mL to about 60 ng/mL, about 30 ng/mL to about 55 ng/mL, about 30 ng/mL to about 50 ng/mL, about 30 ng/mL to about 45 ng/mL, about 30 ng/mL to about 40 ng/mL, about 30 ng/mL to about 35 ng/mL, about 35 ng/L to about 100 ng/mL, about 35 ng/mL to about 95 ng/mL, about 35 ng/mL to about 90 ng/mL, about 35 ng/mL to about 85 ng/mL, about 35 ng/mL to about 80 ng/mL, about 35 ng/mL to about 75 ng/mL, about 35 ng/mL to about 70 ng/mL, about 35 ng/mL to about 65 ng/mL, about 35 ng/mL to about 60 ng/mL, about 35 ng/mL to about 55 ng/mL, about 35 ng/mL to about 50 ng/mL, about 35 ng/mL to about 45 ng/mL, about 35 ng/mL to about 40 ng/mL, about 40 ng/L to about 100 ng/mL, about 40 ng/mL to about 95 ng/mL, about 40 ng/mL to about 90 ng/mL, about 40 ng/mL to about 85 ng/mL, about 40 ng/mL to about 80 ng/mL, about 40 ng/mL to about 75 ng/mL, about 40 ng/mL to about 70 ng/mL, about 40 ng/mL to about 65 ng/mL, about 40 ng/mL to about 60 ng/mL, about 40 ng/mL to about 55 ng/mL, about 40 ng/mL to about 50 ng/mL, about 40 ng/mL to about 45 ng/mL, about 45 ng/L to about 100 ng/mL, about 45 ng/mL to about 95 ng/mL, about 45 ng/mL to about 90 ng/mL, about 45 ng/mL to about 85 ng/mL, about 45 ng/mL to about 80 ng/mL, about 45 ng/mL to about 75 ng/mL, about 45 ng/mL to about 70 ng/mL, about 45 ng/mL to about 65 ng/mL, about 45 ng/mL to about 60 ng/mL, about 45 ng/mL to about 55 ng/mL, about 45 ng/mL to about 50 ng/mL, about 50 ng/L to about 100 ng/mL, about 50 ng/mL to about 95 ng/mL, about 50 ng/mL to about 90 ng/mL, about 50 ng/mL to about 85 ng/mL, about 50 ng/mL to about 80 ng/mL, about 50 ng/mL to about 75 ng/mL, about 50 ng/mL to about 70 ng/mL, about 50 ng/mL to about 65 ng/mL, about 50 ng/mL to about 60 ng/mL, about 50 ng/mL to about 55 ng/mL, about 55 ng/L to about 100 ng/mL, about 55 ng/mL to about 95 ng/mL, about 55 ng/mL to about 90 ng/mL, about 55 ng/mL to about 85 ng/mL, about 55 ng/mL to about 80 ng/mL, about 55 ng/mL to about 75 ng/mL, about 55 ng/mL to about 70 ng/mL, about 55 ng/mL to about 65 ng/mL, about 55 ng/mL to about 60 ng/mL, about 60 ng/L to about 100 ng/mL, about 60 ng/mL to about 95 ng/mL, about 60 ng/mL to about 90 ng/mL, about 60 ng/mL to about 85 ng/mL, about 60 ng/mL to about 80 ng/mL, about 60 ng/mL to about 75 ng/mL, about 60 ng/mL to about 70 ng/mL, about 60 ng/mL to about 65 ng/mL, about 65 ng/L to about 100 ng/mL, about 65 ng/mL to about 95 ng/mL, about 65 ng/mL to about 90 ng/mL, about 65 ng/mL to about 85 ng/mL, about 65 ng/mL to about 80 ng/mL, about 65 ng/mL to about 75 ng/mL, about 65 ng/mL to about 70 ng/mL, about 70 ng/L to about 100 ng/mL, about 70 ng/mL to about 95 ng/mL, about 70 ng/mL to about 90 ng/mL, about 70 ng/mL to about 85 ng/mL, about 70 ng/mL to about 80 ng/mL, about 70 ng/mL to about 75 ng/mL, about 75 ng/L to about 100 ng/mL, about 75 ng/mL to about 95 ng/mL, about 75 ng/mL to about 90 ng/mL, about 75 ng/mL to about 85 ng/mL, about 75 ng/mL to about 80 ng/mL, about 80 ng/L to about 100 ng/mL, about 80 ng/mL to about 95 ng/mL, about 80 ng/mL to about 90 ng/mL, about 80 ng/mL to about 85 ng/mL, about 85 ng/L to about 100 ng/mL, about 85 ng/mL to about 95 ng/mL, about 85 ng/mL to about 90 ng/mL, about 90 ng/L to about 100 ng/mL, about 90 ng/mL to about 95 ng/mL, or about 95 ng/mL to about 100 ng/mL.

[1662] In some embodiments, the method provides a concentration Cₘₐₓ of the immune modulator in the plasma of the subject that is less than 10 pg/ml. In some embodiments, the method provides a concentration Cₘₐₓ of the immune modulator in the plasma of the subject that is less than 3 μg/ml. In some embodiments, the method provides a concentration Cm of the immune modulator in the plasma of the subject that is less than 1 pg/ml. In some embodiments, the method provides a concentration Cₘₐₓ of the immune modulator in the plasma of the subject that is less than 0.3 pg/ml. In some embodiments, the method provides a concentration Cₘₐₓ of the immune modulator in the plasma of the subject that is less than 0.1 pg/ml. In some embodiments, the method provides a concentration Cₘₐₓ of the immune modulator in the plasma of the subject that is less than 0.01 pg/ml.

[1663] In some more particular embodiments, a method of treating a disease or condition of the gastrointestinal tract of a subject comprises administering an induction dose and subsequently a maintenance dose of the immune modulator. In some more particular embodiments, the total induction dose for a given period of time is at least 1.5 times, at least 2 times, at least 3 times, at least 4 times, at least 5 times, at least 6 times, at least 8 times or at least 10 times greater than a systemic induction dose for the same period of time. In some more particular embodiments, the total induction dose for a 2 week period is at least 1.5 times, at least 2 times, at least 3 times, at least 4 times, at least 5 times, at least 6 times, at least 8 times or at least 10 times greater than a systemic induction dose for the same period of time. In some more particular embodiments, the total induction dose for a 4 week period is at least 1.5 times, at least 2 times, at least 3 times, at least 4 times, at least 5 times, at least 6 times, at least 8 times or at least 10 times greater than a systemic induction dose for the same period of time. In some more particular embodiments, the total induction dose for a 6 week period is at least 1.5 times, at least 2 times, at least 3 times, at least 4 times, at least 5 times, at least 6 times, at least 8 times or at least 10 times greater than a systemic induction dose for the same period of time. In some more particular embodiments, the total induction dose for a 8 week period is at least 1.5 times, at least 2 times, at least 3 times, at least 4 times, at least 5 times, at least 6 times, at least 8 times or at least 10 times greater than a systemic induction dose for the same period of time.

[1664] In some more particular embodiments, an ingestible device comprising an immune modulatory agent may be administered once per day or more than once per day, for example, 1, 2, 3, 4 or more times per day. In some more particular embodiments, two or more ingestible devices may be administered at the same time. In some more particular embodiments, two or more ingestible devices may be administered 1 minute apart, 2 minutes apart, 3 minutes apart, 4 minutes apart, 5 minutes apart, 10 minutes apart, 15 minutes apart, 30 minutes apart, or 60 minutes apart. In some more particular embodiments, two or more ingestible devices may be administered 1 hour apart, 2 hours apart, 3 hours apart, 4 hours apart, 5 hours apart, 6 hours apart, 7 hours apart, 8 hours apart, 9 hours apart, 10 hours apart, 11 hours apart, or 12 hours apart.

[1665] In some more particular embodiments, administration of an immune modulator using any of the devices or compositions described herein can provide a reduction in TH memory cell count in the mesenteric lymph nodes of the subject relative to systemic administration of the same amount of the immune modulator that is at least a 10% reduction, at least a 20% reduction, at least a 30% reduction, at least a 40% reduction or at least a 50% reduction.

[1666] In some more particular embodiments, administration of an immune modulator using any of the devices or compositions described herein can provide a reduction in TH memory cell count in the Peyer's Patches of the subject relative to systemic administration of the same amount of the immune modulator that is at least a 10% reduction.

[1667] In some more particular embodiments, administration of an immune modulator using any of the devices or compositions described herein can provide an increase in TH memory cell count in the blood of the subject relative to systemic administration of the same amount of the immune modulator that is at least a 1% increase, at least a 5% increase, at least at 10% increase or at least a 15% increase.

[1668] In some embodiments, the method does not comprise delivering an immune modulator rectally to the subject.

[1669] In some embodiments, the method does not comprise delivering an immune modulator via an enema to the subject.

[1670] In some embodiments, the method does not comprise delivering an immune modulator via suppository to the subject.

[1671] In some embodiments, the method does not comprise delivering an immune modulator via instillation to the rectum of a subject.

[1672] In some embodiments, the methods disclosed herein comprise producing a therapeutically effective degradation product of the immune modulator in the gastrointestinal tract. In some embodiments, a therapeutically effective amount of the degradation product is produced.

[1673] In some embodiments, the methods comprising administering the immune modulator in the manner disclosed herein disclosed herein result in a reduced immunosuppressive properties relative to methods of administration of the immune modulator systemically.

[1674] In some embodiments, the methods comprising administering the immune modulator in the manner disclosed herein disclosed herein result in reduced immunogenicity relative to methods of administration of the immune modulator systemically.

### Patients Condition, Diagnosis and Treatment

[1675] In some embodiments herein, the method of treating an inflammatory disease or disorder that arises in a tissue that originates from the endoderm that comprises releasing an immune modulator at a location in the gastrointestinal tract that is proximate to an intended site of release comprises one or more of the following:
[1676] a) identifying a subject having an inflammatory disease or condition that arises in tissue originating from the endoderm;
[1677] b) determination of the severity of the disease; and
[1678] c) evaluating the subject for suitability to treatment, for example by determining the patency of the subject's GI tract, or if the patients has strictures or fistulae;
[1679] d) administration of an induction dose or of a maintenance dose of an immune modulator;
[1680] e) monitoring the progress of the disease one or more times, for example over a period of about 1-14 weeks, such as about 6-8 weeks following administration of the immune modulator, including at the 6-8 week time point, or over a period of about 52 weeks following administration of the immune modulator, including at the 52 week time point.

[1681] As used herein, an induction dose is a dose of drug that may be administered, for example, at the beginning of a course of treatment, and that is higher than the maintenance dose administered during treatment. An induction dose may also be administered during treatment, for example if the condition of the patients becomes worse.

[1682] As used herein, a maintenance dose is a dose of drug that is provided on a repetitive basis, for example at regular dosing intervals.

[1683] In some embodiments the immune modulator is released from an ingestible device.

[1684] In some embodiments herein, the method of treating an inflammatory disease or condition that arises in a tissue originating from the endoderm comprises releasing an immune modulator at a location in the gastrointestinal tract that is proximate to the intended site of release comprises a) hereinabove.

[1685] In some embodiments herein, the method of treating an inflammatory disease or condition that arises in a tissue originating from the endoderm comprises releasing an immune modulator at a location in the gastrointestinal tract that is proximate to the intended site of release comprises b) hereinabove.

[1686] In some embodiments herein, the method of treating an inflammatory disease or condition that arises in a tissue originating from the endoderm comprises releasing an immune modulator at a location in the gastrointestinal tract that is proximate to the intended site of release comprises c) hereinabove.

[1687] In some embodiments herein, the method of treating an inflammatory disease or condition that arises in a tissue originating from the endoderm comprises releasing an immune modulator at a location in the gastrointestinal tract that is proximate to the intended site of release comprises d) hereinabove.

[1688] In some embodiments herein, the method of treating an inflammatory disease or condition that arises in a tissue originating from the endoderm comprises releasing an immune modulator at a location in the gastrointestinal tract that is proximate to the intended site of release comprises e) hereinabove.

[1689] In some embodiments herein, the method of treating an inflammatory disease or condition that arises in a tissue originating from the endoderm comprises releasing an immune modulator at a location in the gastrointestinal tract that is proximate to the intended site of release comprises a) and b) hereinabove. In some embodiments herein, the method of treating an inflammatory disease or condition that arises in a tissue originating from the endoderm comprises releasing an immune modulator at a location in the gastrointestinal tract that is proximate to the intended site of release comprises a) and c) hereinabove. In some embodiments herein, the method of treating an inflammatory disease or condition that arises in a tissue originating from the endoderm comprises releasing an immune modulator at a location in the gastrointestinal tract that is proximate to the intended site of release comprises a) and d) hereinabove. In some embodiments herein, the method of treating an inflammatory disease or condition that arises in a tissue originating from the endoderm comprises releasing an immune modulator at a location in the gastrointestinal tract that is proximate to the intended site of release comprises a) and e) hereinabove.

[1690] In some embodiments herein, the method of treating an inflammatory disease or condition that arises in a tissue originating from the endoderm comprises releasing an immune modulator at a location in the gastrointestinal tract that is proximate to the intended site of release comprises b) and c) hereinabove. In some embodiments herein, the method of treating an inflammatory disease or condition that arises in a tissue originating from the endoderm comprises releasing an immune modulator at a location in the gastrointestinal tract that is proximate to the intended site of release comprises b) and d) hereinabove. In some embodiments herein, the method of treating an inflammatory disease or condition that arises in a tissue originating from the endoderm comprises releasing an immune modulator at a location in the gastrointestinal tract that is proximate to the intended site of release comprises b) and e) hereinabove.

[1691] In some embodiments herein, the method of treating an inflammatory disease or condition that arises in a tissue originating from the endoderm comprises releasing an immune modulator at a location in the gastrointestinal tract that is proximate to the intended site of release comprises c) and d) hereinabove. In some embodiments herein, the method of treating an inflammatory disease or condition that arises in a tissue originating from the endoderm comprises releasing an immune modulator at a location in the gastrointestinal tract that is proximate to the intended site of release comprises c) and e) hereinabove. In some embodiments herein, the method of treating an inflammatory disease or condition that arises in a tissue originating from the endoderm comprises releasing an immune modulator at a location in the gastrointestinal tract that is proximate to the intended site of release comprises d) and e) hereinabove.

[1692] In some embodiments, one or more steps a) to e) herein comprise endoscopy of the gastrointestinal tract. In some embodiments, one or more steps a) to e) herein comprise colonoscopy of the gastrointestinal tract. In some embodiments, one or more steps a) to e) herein is performed one or more times. In some embodiments, such one or more of such one or more steps a) to e) is performed after releasing the immune modulator at the location in the gastrointestinal tract that is proximate to the intended site of release.

[1693] In some embodiments, the method comprises administering one or more maintenance doses following administration of the induction dose. In some embodiments an induction dose of an immune modulator and a maintenance dose of an immune modulator are each administered to the subject by administering a pharmaceutical composition comprising a therapeutically effective amount of the immune modulator. In some embodiments an induction dose of an immune modulator is administered to the subject in a different manner from the maintenance dose. As an example, the maintenance dose may be administered systemically, while the maintenance dose is administered locally using a device. In one embodiment, a maintenance dose is administered systemically, and an induction dose is administered using a device every 1, 2, 3, 4, 5, 6, 7, 10, 15, 20, 25, 30, 35, 40, or 45 days. In another embodiment, a maintenance dose is administered systemically, and an induction dose is administered when a disease flare up is detected or suspected.

[1694] In some embodiments, the induction dose is a dose of the immune modulator is administered in an ingestible device as disclosed herein. In some embodiments, the maintenance dose is a dose of the immune modulator administered in an ingestible device as disclosed herein.

[1695] In some embodiments, the induction dose is a dose of the immune modulator administered in an ingestible device as disclosed herein. In some embodiments, the maintenance dose is a dose of the immune modulator delivered systemically, such as orally with a tablet or capsule, or subcutaneously, or intravenously.

[1696] In some embodiments, the induction dose is a dose of the immune modulator delivered systemically, such as orally with a tablet or capsule, or subcutaneously, or intravenously. In some embodiments, the maintenance dose is a dose of the immune modulator administered in an ingestible device as disclosed herein.

[1697] In some embodiments, the induction dose is a dose of the immune modulator administered in an ingestible device as disclosed herein. In some embodiments, the maintenance dose is a dose of a second agent as disclosed herein delivered systemically, such as orally with a tablet or capsule, or subcutaneously, or intravenously.

[1698] In some embodiments, the induction dose is a dose of a second agent as disclosed herein delivered systemically, such as orally with a tablet or capsule, or subcutaneously, or intravenously. In some embodiments, the maintenance dose is a dose of the immune modulator administered in an ingestible device as disclosed herein.

[1699] In one embodiment of the methods provided herein, the patient is not previously treated with an immune modulator.

[1700] In some embodiments, the method comprises identifying the intended site of release substantially at the same time as releasing the immune modulator.

[1701] In some embodiments, the method comprises monitoring the progress of the disease. In some embodiments, the method comprises administering an immune modulator with a spray catheter. For example, administering an immune modulator with a spray catheter may be performed in step (e) hereinabove.

[1702] In some embodiments, the method does not comprise administering an immune modulator with a spray catheter.

[1703] In some embodiments, data obtained from cell culture assays and animal studies can be used in formulating an appropriate dosage of any given immune modulator. The effectiveness and dosing of any immune modulator can be determined by a health care professional or veterinary professional using methods known in the art, as well as by the observation of one or more disease symptoms in a subject (e.g., a human). Certain factors may influence the dosage and timing required to effectively treat a subject (e.g., the severity of the disease or disorder, previous treatments, the general health and/or age of the subject, and the presence of other diseases).

[1704] In some embodiments, the subject is further administered an additional therapeutic agent (e.g., any of the additional therapeutic agents described herein). The additional therapeutic agent can be administered to the subject at substantially the same time as the immune modulator or pharmaceutical composition comprising it is administered and/or at one or more other time points. In some embodiments, the additional therapeutic agent is formulated together with the immune modulator (e.g., using any of the examples of formulations described herein).

[1705] In some embodiments, the subject is administered a dose of the immune modulator at least once a month (e.g., at least twice a month, at least three times a month, at least four times a month, at least once a week, at least twice a week, three times a week, once a day, or twice a day). The immune modulator may be administered to a subject chronically. Chronic treatments include any form of repeated administration for an extended period of time, such as repeated administrations for one or more months, between a month and a year, one or more years, more than five years, more than 10 years, more than 15 years, more than 20 years, more than 25 years, more than 30 years, more than 35 years, more than 40 years, more than 45 years, or longer. Alternatively or in addition, chronic treatments may be administered. Chronic treatments can involve regular administrations, for example one or more times a day, one or more times a week, or one or more times a month. For example, chronic treatment can include administration (e.g., intravenous administration) about every two weeks (e.g., between about every 10 to 18 days).

[1706] A suitable dose may be the amount that is the lowest dose effective to produce a desired therapeutic effect. Such an effective dose will generally depend upon the factors described herein. If desired, an effective daily dose of immune modulator can be administered as two, three, four, five, or six or more sub-doses administered separately at appropriate intervals throughout the day, optionally, in unit dosage forms.

[1707] In some examples, administration of an immune modulator using any of the compositions or devices described herein can result in the onset of treatment (e.g., a reduction in the number, severity, or duration of one or more symptoms and/or markers of any of the inflammatory diseases or conditions that arise in tissue originating from the endoderm described herein) or drug-target engagement in a subject within a time period of about 10 minutes to about 10 hours, about 10 minutes to about 9 hours, about 10 minutes to about 8 hours, about 10 minutes to about 7 hours, about 10 minutes to about 6 hours, about 10 minutes to about 5 hours, about 10 minutes to about 4.5 hours, about 10 minutes to about 4 hours, about 10 minutes to about 3.5 hours, about 10 minutes to about 3 hours, about 10 minutes to about 2.5 hours, about 10 minutes to about 2 hours, about 10 minutes to about 1.5 hours, about 10 minutes to about 1 hour, about 10 minutes to about 55 minutes, about 10 minutes to about 50 minutes, about 10 minutes to about 45 minutes, about 10 minutes to about 40 minutes, about 10 minutes to about 35 minutes, about 10 minutes to about 30 minutes, about 10 minutes to about 25 minutes, about 10 minutes to about 20 minutes, about 10 minutes to about 15 minutes, about 15 minutes to about 10 hours, about 15 minutes to about 9 hours, about 15 minutes to about 8 hours, about 15 minutes to about 7 hours, about 15 minutes to about 6 hours, about 15 minutes to about 5 hours, about 15 minutes to about 4.5 hours, about 15 minutes to about 4 hours, about 15 minutes to about 3.5 hours, about 15 minutes to about 3 hours, about 15 minutes to about 2.5 hours, about 15 minutes to about 2 hours, about 15 minutes to about 1.5 hours, about 15 minutes to about 1 hour, about 15 minutes to about 55 minutes, about 15 minutes to about 50 minutes, about 15 minutes to about 45 minutes, about 15 minutes to about 40 minutes, about 15 minutes to about 35 minutes, about 15 minutes to about 30 minutes, about 15 minutes to about 25 minutes, about 15 minutes to about 20 minutes, about 20 minutes to about 10 hours, about 20 minutes to about 9 hours, about 20 minutes to about 8 hours, about 20 minutes to about 7 hours, about 20 minutes to about 6 hours, about 20 minutes to about 5 hours, about 20 minutes to about 4.5 hours, about 20 minutes to about 4 hours, about 20 minutes to about 3.5 hours, about 20 minutes to about 3 hours, about 20 minutes to about 2.5 hours, about 20 minutes to about 2 hours, about 20 minutes to about 1.5 hours, about 20 minutes to about 1 hour, about 20 minutes to about 55 minutes, about 20 minutes to about 50 minutes, about 20 minutes to about 45 minutes, about 20 minutes to about 40 minutes, about 20 minutes to about 35 minutes, about 20 minutes to about 30 minutes, about 20 minutes to about 25 minutes, about 25 minutes to about 10 hours, about 25 minutes to about 9 hours, about 25 minutes to about 8 hours, about 25 minutes to about 7 hours, about 25 minutes to about 6 hours, about 25 minutes to about 5 hours, about 25 minutes to about 4.5 hours, about 25 minutes to about 4 hours, about 25 minutes to about 3.5 hours, about 25 minutes to about 3 hours, about 25 minutes to about 2.5 hours, about 25 minutes to about 2 hours, about 25 minutes to about 1.5 hours, about 25 minutes to about 1 hour, about 25 minutes to about 55 minutes, about 25 minutes to about 50 minutes, about 25 minutes to about 45 minutes, about 25 minutes to about 40 minutes, about 25 minutes to about 35 minutes, about 25 minutes to about 30 minutes, about 30 minutes to about 10 hours, about 30 minutes to about 9 hours, about 30 minutes to about 8 hours, about 30 minutes to about 7 hours, about 30 minutes to about 6 hours, about 30 minutes to about 5 hours, about 30 minutes to about 4.5 hours, about 30 minutes to about 4 hours, about 30 minutes to about 3.5 hours, about 30 minutes to about 3 hours, about 30 minutes to about 2.5 hours, about 30 minutes to about 2 hours, about 30 minutes to about 1.5 hours, about 30 minutes to about 1 hour, about 30 minutes to about 55 minutes, about 30 minutes to about 50 minutes, about 30 minutes to about 45 minutes, about 30 minutes to about 40 minutes, about 30 minutes to about 35 minutes, about 35 minutes to about 10 hours, about 35 minutes to about 9 hours, about 35 minutes to about 8 hours, about 35 minutes to about 7 hours, about 35 minutes to about 6 hours, about 35 minutes to about 5 hours, about 35 minutes to about 4.5 hours, about 35 minutes to about 4 hours, about 35 minutes to about 3.5 hours, about 35 minutes to about 3 hours, about 35 minutes to about 2.5 hours, about 35 minutes to about 2 hours, about 35 minutes to about 1.5 hours, about 35 minutes to about 1 hour, about 35 minutes to about 55 minutes, about 35 minutes to about 50 minutes, about 35 minutes to about 45 minutes, about 35 minutes to about 40 minutes, about 40 minutes to about 10 hours, about 40 minutes to about 9 hours, about 40 minutes to about 8 hours, about 40 minutes to about 7 hours, about 40 minutes to about 6 hours, about 40 minutes to about 5 hours, about 40 minutes to about 4.5 hours, about 40 minutes to about 4 hours, about 40 minutes to about 3.5 hours, about 40 minutes to about 3 hours, about 40 minutes to about 2.5 hours, about 40 minutes to about 2 hours, about 40 minutes to about 1.5 hours, about 40 minutes to about 1 hour, about 40 minutes to about 55 minutes, about 40 minutes to about 50 minutes, about 40 minutes to about 45 minutes, about 45 minutes to about 10 hours, about 45 minutes to about 9 hours, about 45 minutes to about 8 hours, about 45 minutes to about 7 hours, about 45 minutes to about 6 hours, about 45 minutes to about 5 hours, about 45 minutes to about 4.5 hours, about 45 minutes to about 4 hours, about 45 minutes to about 3.5 hours, about 45 minutes to about 3 hours, about 45 minutes to about 2.5 hours, about 45 minutes to about 2 hours, about 45 minutes to about 1.5 hours, about 45 minutes to about 1 hour, about 45 minutes to about 55 minutes, about 45 minutes to about 50 minutes, about 50 minutes to about 10 hours, about 50 minutes to about 9 hours, about 50 minutes to about 8 hours, about 50 minutes to about 7 hours, about 50 minutes to about 6 hours, about 50 minutes to about 5 hours, about 50 minutes to about 4.5 hours, about 50 minutes to about 4 hours, about 50 minutes to about 3.5 hours, about 50 minutes to about 3 hours, about 50 minutes to about 2.5 hours, about 50 minutes to about 2 hours, about 50 minutes to about 1.5 hours, about 50 minutes to about 1 hour, about 50 minutes to about 55 minutes, about 55 minutes to about 10 hours, about 55 minutes to about 9 hours, about 55 minutes to about 8 hours, about 55 minutes to about 7 hours, about 55 minutes to about 6 hours, about 55 minutes to about 5 hours, about 55 minutes to about 4.5 hours, about 55 minutes to about 4 hours, about 55 minutes to about 3.5 hours, about 55 minutes to about 3 hours, about 55 minutes to about 2.5 hours, about 55 minutes to about 2 hours, about 55 minutes to about 1.5 hours, about 55 minutes to about 1 hour, about 1 hour to about 10 hours, about 1 hour to about 9 hours, about 1 hour to about 8 hours, about 1 hour to about 7 hours, about 1 hour to about 6 hours, about 1 hour to about 5 hours, about 1 hour to about 4.5 hours, about 1 hour to about 4 hours, about 1 hour to about 3.5 hours, about 1 hour to about 3 hours, about 1 hour to about 2.5 hours, about 1 hour to about 2 hours, about 1 hour to about 1.5 hours, about 1.5 hours to about 10 hours, about 1.5 hours to about 9 hours, about 1.5 hours to about 8 hours, about 1.5 hours to about 7 hours, about 1.5 hours to about 6 hours, about 1.5 hours to about 5 hours, about 1.5 hours to about 4.5 hours, about 1.5 hours to about 4 hours, about 1.5 hours to about 3.5 hours, about 1.5 hours to about 3 hours, about 1.5 hours to about 2.5 hours, about 1.5 hours to about 2 hours, about 2 hours to about 10 hours, about 2 hours to about 9 hours, about 2 hours to about 8 hours, about 2 hours to about 7 hours, about 2 hours to about 6 hours, about 2 hours to about 5 hours, about 2 hours to about 4.5 hours, about 2 hours to about 4 hours, about 2 hours to about 3.5 hours, about 2 hours to about 3 hours, about 2 hours to about 2.5 hours, about 2.5 hours to about 10 hours, about 2.5 hours to about 9 hours, about 2.5 hours to about 8 hours, about 2.5 hours to about 7 hours, about 2.5 hours to about 6 hours, about 2.5 hours to about 5 hours, about 2.5 hours to about 4.5 hours, about 2.5 hours to about 4 hours, about 2.5 hours to about 3.5 hours, about 2.5 hours to about 3 hours, about 3 hours to about 10 hours, about 3 hours to about 9 hours, about 3 hours to about 8 hours, about 3 hours to about 7 hours, about 3 hours to about 6 hours, about 3 hours to about 5 hours, about 3 hours to about 4.5 hours, about 3 hours to about 4 hours, about 3 hours to about 3.5 hours, about 3.5 hours to about 10 hours, about 3.5 hours to about 9 hours, about 3.5 hours to about 8 hours, about 3.5 hours to about 7 hours, about 3.5 hours to about 6 hours, about 3.5 hours to about 5 hours, about 3.5 hours to about 4.5 hours, about 3.5 hours to about 4 hours, about 4 hours to about 10 hours, about 4 hours to about 9 hours, about 4 hours to about 8 hours, about 4 hours to about 7 hours, about 4 hours to about 6 hours, about 4 hours to about 5 hours, about 4 hours to about 4.5 hours, about 4.5 hours to about 10 hours, about 4.5 hours to about 9 hours, about 4.5 hours to about 8 hours, about 4.5 hours to about 7 hours, about 4.5 hours to about 6 hours, about 4.5 hours to about 5 hours, about 5 hours to about 10 hours, about 5 hours to about 9 hours, about 5 hours to about 8 hours, about 5 hours to about 7 hours, about 5 hours to about 6 hours, about 6 hours to about 10 hours, about 6 hours to about 9 hours, about 6 hours to about 8 hours, about 6 hours to about 7 hours, about 7 hours to about 10 hours, about 7 hours to about 9 hours, about 7 hours to about 8 hours, about 8 hours to about 10 hours, about 8 hours to about 9 hours, or about 9 hours to about 10 hours of administration of a dose of an immune modulator using any of the devices or compositions described herein. Drug-target engagement may be determined, for example, as disclosed in Simon G M, Niphakis M J, Cravatt B F, Nature chemical biology. 2013; 9(4):200-205, incorporated by reference herein in its entirety.

[1708] In some embodiments, administration of an immune modulator using any of the devices or compositions described herein can provide for treatment (e.g., a reduction in the number, severity, and/or duration of one or more symptoms and/or markers of any of the inflammatory diseases or conditions that arise in a tissue originating from the endoderm in a subject) for a time period of between about 1 hour to about 30 days, about 1 hour to about 28 days, about 1 hour to about 26 days, about 1 hour to about 24 days, about 1 hour to about 22 days, about 1 hour to about 20 days, about 1 hour to about 18 days, about 1 hour to about 16 days, about 1 hour to about 14 days, about 1 hour to about 12 days, about 1 hour to about 10 days, about 1 hour to about 8 days, about 1 hour to about 6 days, about 1 hour to about 5 days, about 1 hour to about 4 days, about 1 hour to about 3 days, about 1 hour to about 2 days, about 1 hour to about 1 day, about 1 hour to about 12 hours, about 1 hour to about 6 hours, about 1 hour to about 3 hours, about 3 hours to about 30 days, about 3 hours to about 28 days, about 3 hours to about 26 days, about 3 hours to about 24 days, about 3 hours to about 22 days, about 3 hours to about 20 days, about 3 hours to about 18 days, about 3 hours to about 16 days, about 3 hours to about 14 days, about 3 hours to about 12 days, about 3 hours to about 10 days, about 3 hours to about 8 days, about 3 hours to about 6 days, about 3 hours to about 5 days, about 3 hours to about 4 days, about 3 hours to about 3 days, about 3 hours to about 2 days, about 3 hours to about 1 day, about 3 hours to about 12 hours, about 3 hours to about 6 hours, about 6 hours to about 30 days, about 6 hours to about 28 days, about 6 hours to about 26 days, about 6 hours to about 24 days, about 6 hours to about 22 days, about 6 hours to about 20 days, about 6 hours to about 18 days, about 6 hours to about 16 days, about 6 hours to about 14 days, about 6 hours to about 12 days, about 6 hours to about 10 days, about 6 hours to about 8 days, about 6 hours to about 6 days, about 6 hours to about 5 days, about 6 hours to about 4 days, about 6 hours to about 3 days, about 6 hours to about 2 days, about 6 hours to about 1 day, about 6 hours to about 12 hours, about 12 hours to about 30 days, about 12 hours to about 28 days, about 12 hours to about 26 days, about 12 hours to about 24 days, about 12 hours to about 22 days, about 12 hours to about 20 days, about 12 hours to about 18 days, about 12 hours to about 16 days, about 12 hours to about 14 days, about 12 hours to about 12 days, about 12 hours to about 10 days, about 12 hours to about 8 days, about 12 hours to about 6 days, about 12 hours to about 5 days, about 12 hours to about 4 days, about 12 hours to about 3 days, about 12 hours to about 2 days, about 12 hours to about 1 day, about 1 day to about 30 days, about 1 day to about 28 days, about 1 day to about 26 days, about 1 day to about 24 days, about 1 day to about 22 days, about 1 day to about 20 days, about 1 day to about 18 days, about 1 day to about 16 days, about 1 day to about 14 days, about 1 day to about 12 days, about 1 day to about 10 days, about 1 day to about 8 days, about 1 day to about 6 days, about 1 day to about 5 days, about 1 day to about 4 days, about 1 day to about 3 days, about 1 day to about 2 days, about 2 days to about 30 days, about 2 days to about 28 days, about 2 days to about 26 days, about 2 days to about 24 days, about 2 days to about 22 days, about 2 days to about 20 days, about 2 days to about 18 days, about 2 days to about 16 days, about 2 days to about 14 days, about 2 days to about 12 days, about 2 days to about 10 days, about 2 days to about 8 days, about 2 days to about 6 days, about 2 days to about 5 days, about 2 days to about 4 days, about 2 days to about 3 days, about 3 days to about 30 days, about 3 days to about 28 days, about 3 days to about 26 days, about 3 days to about 24 days, about 3 days to about 22 days, about 3 days to about 20 days, about 3 days to about 18 days, about 3 days to about 16 days, about 3 days to about 14 days, about 3 days to about 12 days, about 3 days to about 10 days, about 3 days to about 8 days, about 3 days to about 6 days, about 3 days to about 5 days, about 3 days to about 4 days, about 4 days to about 30 days, about 4 days to about 28 days, about 4 days to about 26 days, about 4 days to about 24 days, about 4 days to about 22 days, about 4 days to about 20 days, about 4 days to about 18 days, about 4 days to about 16 days, about 4 days to about 14 days, about 4 days to about 12 days, about 4 days to about 10 days, about 4 days to about 8 days, about 4 days to about 6 days, about 4 days to about 5 days, about 5 days to about 30 days, about 5 days to about 28 days, about 5 days to about 26 days, about 5 days to about 24 days, about 5 days to about 22 days, about 5 days to about 20 days, about 5 days to about 18 days, about 5 days to about 16 days, about 5 days to about 14 days, about 5 days to about 12 days, about 5 days to about 10 days, about 5 days to about 8 days, about 5 days to about 6 days, about 6 days to about 30 days, about 6 days to about 28 days, about 6 days to about 26 days, about 6 days to about 24 days, about 6 days to about 22 days, about 6 days to about 20 days, about 6 days to about 18 days, about 6 days to about 16 days, about 6 days to about 14 days, about 6 days to about 12 days, about 6 days to about 10 days, about 6 days to about 8 days, about 8 days to about 30 days, about 8 days to about 28 days, about 8 days to about 26 days, about 8 days to about 24 days, about 8 days to about 22 days, about 8 days to about 20 days, about 8 days to about 18 days, about 8 days to about 16 days, about 8 days to about 14 days, about 8 days to about 12 days, about 8 days to about 10 days, about 10 days to about 30 days, about 10 days to about 28 days, about 10 days to about 26 days, about 10 days to about 24 days, about 10 days to about 22 days, about 10 days to about 20 days, about 10 days to about 18 days, about 10 days to about 16 days, about 10 days to about 14 days, about 10 days to about 12 days, about 12 days to about 30 days, about 12 days to about 28 days, about 12 days to about 26 days, about 12 days to about 24 days, about 12 days to about 22 days, about 12 days to about 20 days, about 12 days to about 18 days, about 12 days to about 16 days, about 12 days to about 14 days, about 14 days to about 30 days, about 14 days to about 28 days, about 14 days to about 26 days, about 14 days to about 24 days, about 14 days to about 22 days, about 14 days to about 20 days, about 14 days to about 18 days, about 14 days to about 16 days, about 16 days to about 30 days, about 16 days to about 28 days, about 16 days to about 26 days, about 16 days to about 24 days, about 16 days to about 22 days, about 16 days to about 20 days, about 16 days to about 18 days, about 18 days to about 30 days, about 18 days to about 28 days, about 18 days to about 26 days, about 18 days to about 24 days, about 18 days to about 22 days, about 18 days to about 20 days, about 20 days to about 30 days, about 20 days to about 28 days, about 20 days to about 26 days, about 20 days to about 24 days, about 20 days to about 22 days, about 22 days to about 30 days, about 22 days to about 28 days, about 22 days to about 26 days, about 22 days to about 24 days, about 24 days to about 30 days, about 24 days to about 28 days, about 24 days to about 26 days, about 26 days to about 30 days, about 26 days to about 28 days, or about 28 days to about 30 days in a subject following first administration of an immune modulator using any of the compositions or devices described herein. Non-limiting examples of symptoms and/or markers of a disease described herein are described below.

[1709] For example, treatment can result in a decrease (e.g., about 1% to about 99% decrease, about 1% to about 95% decrease, about 1% to about 90% decrease, about 1% to about 85% decrease, about 1% to about 80% decrease, about 1% to about 75% decrease, about 1% to about 70% decrease, about 1% to about 65% decrease, about 1% to about 60% decrease, about 1% to about 55% decrease, about 1% to about 50% decrease, about 1% to about 45% decrease, about 1% to about 40% decrease, about 1% to about 35% decrease, about 1% to about 30% decrease, about 1% to about 25% decrease, about 1% to about 20% decrease, about 1% to about 15% decrease, about 1% to about 10% decrease, about 1% to about 5% decrease, about 5% to about 99% decrease, about 5% to about 95% decrease, about 5% to about 90% decrease, about 5% to about 85% decrease, about 5% to about 80% decrease, about 5% to about 75% decrease, about 5% to about 70% decrease, about 5% to about 65% decrease, about 5% to about 60% decrease, about 5% to about 55% decrease, about 5% to about 50% decrease, about 5% to about 45% decrease, about 5% to about 40% decrease, about 5% to about 35% decrease, about 5% to about 30% decrease, about 5% to about 25% decrease, about 5% to about 20% decrease, about 5% to about 15% decrease, about 5% to about 10% decrease, about 10% to about 99% decrease, about 10% to about 95% decrease, about 10% to about 90% decrease, about 10% to about 85% decrease, about 10% to about 80% decrease, about 10% to about 75% decrease, about 10% to about 70% decrease, about 10% to about 65% decrease, about 10% to about 60% decrease, about 10% to about 55% decrease, about 10% to about 50% decrease, about 10% to about 45% decrease, about 10% to about 40% decrease, about 10% to about 35% decrease, about 10% to about 30% decrease, about 10% to about 25% decrease, about 10% to about 20% decrease, about 10% to about 15% decrease, about 15% to about 99% decrease, about 15% to about 95% decrease, about 15% to about 90% decrease, about 15% to about 85% decrease, about 15% to about 80% decrease, about 15% to about 75% decrease, about 15% to about 70% decrease, about 15% to about 65% decrease, about 15% to about 60% decrease, about 15% to about 55% decrease, about 15% to about 50% decrease, about 15% to about 45% decrease, about 15% to about 40% decrease, about 15% to about 35% decrease, about 15% to about 30% decrease, about 15% to about 25% decrease, about 15% to about 20% decrease, about 20% to about 99% decrease, about 20% to about 95% decrease, about 20% to about 90% decrease, about 20% to about 85% decrease, about 20% to about 80% decrease, about 20% to about 75% decrease, about 20% to about 70% decrease, about 20% to about 65% decrease, about 20% to about 60% decrease, about 20% to about 55% decrease, about 20% to about 50% decrease, about 20% to about 45% decrease, about 20% to about 40% decrease, about 20% to about 35% decrease, about 20% to about 30% decrease, about 20% to about 25% decrease, about 25% to about 99% decrease, about 25% to about 95% decrease, about 25% to about 90% decrease, about 25% to about 85% decrease, about 25% to about 80% decrease, about 25% to about 75% decrease, about 25% to about 70% decrease, about 25% to about 65% decrease, about 25% to about 60% decrease, about 25% to about 55% decrease, about 25% to about 50% decrease, about 25% to about 45% decrease, about 25% to about 40% decrease, about 25% to about 35% decrease, about 25% to about 30% decrease, about 30% to about 99% decrease, about 30% to about 95% decrease, about 30% to about 90% decrease, about 30% to about 85% decrease, about 30% to about 80% decrease, about 30% to about 75% decrease, about 30% to about 70% decrease, about 30% to about 65% decrease, about 30% to about 60% decrease, about 30% to about 55% decrease, about 30% to about 50% decrease, about 30% to about 45% decrease, about 30% to about 40% decrease, about 30% to about 35% decrease, about 35% to about 99% decrease, about 35% to about 95% decrease, about 35% to about 90% decrease, about 35% to about 85% decrease, about 35% to about 80% decrease, about 35% to about 75% decrease, about 35% to about 70% decrease, about 35% to about 65% decrease, about 35% to about 60% decrease, about 35% to about 55% decrease, about 35% to about 50% decrease, about 35% to about 45% decrease, about 35% to about 40% decrease, about 40% to about 99% decrease, about 40% to about 95% decrease, about 40% to about 90% decrease, about 40% to about 85% decrease, about 40% to about 80% decrease, about 40% to about 75% decrease, about 40% to about 70% decrease, about 40% to about 65% decrease, about 40% to about 60% decrease, about 40% to about 55% decrease, about 40% to about 50% decrease, about 40% to about 45% decrease, about 45% to about 99% decrease, about 45% to about 95% decrease, about 45% to about 90% decrease, about 45% to about 85% decrease, about 45% to about 80% decrease, about 45% to about 75% decrease, about 45% to about 70% decrease, about 45% to about 65% decrease, about 45% to about 60% decrease, about 45% to about 55% decrease, about 45% to about 50% decrease, about 50% to about 99% decrease, about 50% to about 95% decrease, about 50% to about 90% decrease, about 50% to about 85% decrease, about 50% to about 80% decrease, about 50% to about 75% decrease, about 50% to about 70% decrease, about 50% to about 65% decrease, about 50% to about 60% decrease, about 50% to about 55% decrease, about 55% to about 99% decrease, about 55% to about 95% decrease, about 55% to about 90% decrease, about 55% to about 85% decrease, about 55% to about 80% decrease, about 55% to about 75% decrease, about 55% to about 70% decrease, about 55% to about 65% decrease, about 55% to about 60% decrease, about 60% to about 99% decrease, about 60% to about 95% decrease, about 60% to about 90% decrease, about 60% to about 85% decrease, about 60% to about 80% decrease, about 60% to about 75% decrease, about 60% to about 70% decrease, about 60% to about 65% decrease, about 65% to about 99% decrease, about 65% to about 95% decrease, about 65% to about 90% decrease, about 65% to about 85% decrease, about 65% to about 80% decrease, about 65% to about 75% decrease, about 65% to about 70% decrease, about 70% to about 99% decrease, about 70% to about 95% decrease, about 70% to about 90% decrease, about 70% to about 85% decrease, about 70% to about 80% decrease, about 70% to about 75% decrease, about 75% to about 99% decrease, about 75% to about 95% decrease, about 75% to about 90% decrease, about 75% to about 85% decrease, about 75% to about 80% decrease, about 80% to about 99% decrease, about 80% to about 95% decrease, about 80% to about 90% decrease, about 80% to about 85% decrease, about 85% to about 99% decrease, about 85% to about 95% decrease, about 85% to about 90% decrease, about 90% to about 99% decrease, about 90% to about 95% decrease, or about 95% to about 99% decrease) in one or more (e.g., two, three, four, five, six, seven, eight, nine, ten, eleven, or twelve) of the severity of one or more symptoms of the inflammatory disease or condition that arises in a tissue originating from the endoderm, a decrease in the number of memory Th cells present in a meserteric lymph node, a decrease in the expression of α4β7 integrin in memory Th cells present in a mesenteric lymph node, a decrease in the number of memory Th cells present in the Peyer's patch, and a decrease in the expression of α4β7 integrin in memory Th cells present in the Peyer's patch, a decrease in the level of interferon-γ in the tissue originating from the endoderm involved in the inflammatory disease or condition, a decrease in the level of IL-I Pin the tissue originating from the endoderm involved in the inflammatory disease or condition, a decrease in the level of IL-6 in the tissue originating from the endoderm involved in the inflammatory disease or condition, a decrease in the level of IL-22 in the tissue originating from the endoderm involved in the inflammatory disease or condition, a decrease in the level of IL-17A in the tissue originating from the endoderm involved in the inflammatory disease or condition, a decrease in the level of TNFα in the tissue originating from the endoderm involved in the inflammatory disease or condition, a decrease in the level of IL-2 in the tissue originating from the endoderm involved in the inflammatory disease or condition, and a decrease in the number of T-lymphocytes that have migrated into the tissue originating from the endoderm involved in the inflammatory disease or condition, in a subject (e.g., as compared to the level in the subject prior to treatment or compared to a subject or population of subjects having a similar disease but receiving a placebo or a different treatment) (e.g., for a time period of between about 1 hour to about 30 days (e.g., or any of the subranges herein) following the first administration of an immune modulator using any of the compositions or devices described herein. As used herein, “GI tissue” refers to tissue in the gastrointestinal (GI) tract, such as tissue in one or more of duodenum, jejunum, ileum, cecum, ascending colon, transverse colon, descending colon, sigmoid colon, and rectum, more particularly in the proximal portion of one or more of duodenum, jejunum, ileum, cecum, ascending colon, transverse colon, descending colon, and sigmoid colon, or in the distal portion of one or more of duodenum, jejunum, ileum, cecum, ascending colon, transverse colon, descending colon, and sigmoid colon. Exemplary methods for determining the levels of interferon-γ, IL-1p, IL-6, IL-22, IL-17A, TNFα, and IL-2 are described herein. Additional methods for determining the levels of these cytokines are known in the art. Exemplary methods for determining the number of Th memory cells in Peyer's patches and mesentery lymph nodes are described herein. Additional methods for determining the number of Th memory cells in Peyer's patches and mesentery lymph nodes are known in the art.

[1710] Accordingly, in some embodiments, a method of treatment disclosed herein includes determining the level of a marker at the location of disease in a subject (e.g., either before and/or after administration of the device). In some embodiments, the marker is a biomarker and the method of treatment disclosed herein comprises determining that the level of a biomarker at the location of disease is a subject following administration of the device is decreased as compared to the level of the biomarker at the same location of disease in a subject either before administration or at the same time point following systemic administration of an equal amount of the immune modulator. In some examples, the level of the biomarker at the same location of disease following administration of the device is 1% decreased to 99% decreased as compared to the level of the biomarker at the same location of disease in a subject either before administration or at the same time point following systemic administration of an equal amount of the immune modulator. In some embodiments, the level of the marker is one or more of: the level of interferon-γ, the level of IL-17A, the level of TNFα, the level of IL-2, the number of Th memory cells in Peyer's patches, and the number of Th memory cells in mesenteric lymph nodes.

[1711] In some embodiments, the method of treatment disclosed herein includes determining that the level of a marker at a time point following administration of a device is lower than the level of the marker at a time point following administration of the device is lower than the level of the marker in a subject prior to administration of the device or in a subject at substantially the same time point following systemic administration of an equal amount of the immune modulator. In some examples, the level of the marker following administration of the device is 1% decreased to 99% decreased as compared to the level of the marker in a subject prior to administration of the device or in a subject at the same time point following systemic administration of an equal amount of the immune modulator. In some examples, a method of treatment disclosed herein includes determining the level of the biomarker at the location of disease in a subject within a time period of about 10 minutes to 10 hours following administration of the device.

[1712] In some embodiments, a method of treatment described herein includes: (i) determining the ratio RB of the level LiB of a biomarker at the location of disease at a first time point following administration of the device and the level L2B of the biomarker at the same location of disease in a subject at substantially the same time point following systemic administration of an equal amount of the immune modulator; (ii) determining the ratio of R_{D} of the level of L_{1D} of the immune modulator at the same location and the substantially the same time point as in (i) and the level L_{2D} of the immune modulator at the same location of disease in a subject at substantially the same time point following systemic administration of an equal amount of the immune modulator; and (iii) determining the ratio of R_{B}/R_{D}.

[1713] In some embodiments, a method of treatment disclosed herein can include: (i) determining the ratio R_{B} of the level L_{1B} of a biomarker at the location of disease at a time point following administration of the device and the level L2B of the biomarker at the same location of disease in a subject at substantially the same time point following systemic administration of an equal amount of the immune modulator; (ii) determining the ratio R_{D} of the level L_{1D} of the immune modulator at the same location and at substantially the time point as in (i) and the level L_{2D} of the immune modulator in a subject at the same location of disease at substantially the same time point following systemic administration of an equal amount of the immune modulator; and (iii) determining the product R_{B}×R_{D}.

[1714] In some embodiments, a method of treatment disclosed herein can include determining that the level of a marker in a subject at a time point following administration of the device is elevated as compared to a level of the marker in a subject prior to administration of the device or a level at substantially the same time point in a subject following systemic administration of an equal amount of the immune modulator. In some examples, the level of the marker at a time point following administration of the device is 1% increased or 400% increased as compared to the level of the marker in a subject prior to administration of the device or a level at substantially the same time point in a subject following systemic administration of an equal amount of the immune modulator. In some examples, a method of treatment disclosed herein includes determining the level of the marker in a subject within a period of about 10 minutes to about 10 hours following administration of the device.

[1715] In some embodiments, a method of treatment disclosed herein can include determining the level of a marker in a subject's blood, serum or plasma.

[1716] An illustrative list of examples of biomarkers for GI disorders includes interferon-γ, IL-1β, IL-6, IL-22, IL-17A, TNFα, IL-2, memory cells (CD44⁺CD45RB⁻CD4⁺ cells); α4β7; VEGF; ICAM; VCAM; SAA; Calprotectin; lactoferrin; FGF2; TGFb; ANG-1; ANG-2; PLGF; Biologics (Infliximab; Humira; Stelara; Vedolizumab; Simponi; Jak inhibitors; Others); EGF; IL12/23p40; GMCSF; A4 B7; AeB7; CRP; SAA; ICAM; VCAM; AREG; EREG; HB-EGF; HRG; BTC; TGFα; SCF; TWEAK; MMP-9; MMP-6; Ceacam CD66; IL10; ADA; Madcam-1; CD166 (AL CAM); FGF2; FGF7; FGF9; FGF19; ANCA Antineutrophil cytoplasmic antibody; ASCAA Anti-Saccharomyces Cerevisiae Antibody IgA; ASCAG Anti-Saccharomyces Cerevisiae Antibody IgG; CBir1 Anti-Clostridium cluster XIVa flagellin CBir1 antibody; A4-Fla2 Anti-Clostridium cluster XIVa flagellin 2 antibody; FlaX Anti-Clostridium cluster XIVa flagellin X antibody; OmpC Anti-Escherichia coli Outer Membrane Protein C; ANCA Perinuclear AntiNeutrophil Cytoplasmic Antibody; AREG Amphiregulin Protein; BTC Betacellulin Protein; EGF Epidermal Growth Factor EREG

[1717] Epiregulin Protein; HBEGF Heparin Binding Epidermal Growth Factors; HGF Hepatocyte Growth Factor; HRG Neuregulin-1; TGFA Transforming Growth Factor alpha; CRP C-Reactive Protein; SAA Serum Amyloid A; ICAM-1 Intercellular Adhesion Molecule 1; VCAM-1 Vascular Cell Adhesion Molecule 1; fibroblasts underlying the intestinal epithelium; and HGF.

[1718] In some embodiments, a marker is an IBD biomarker, such as, for example: anti-glycan; anti-Saccharomices cerevisiae (ASCA); anti-laminaribioside (ALCA); anti-chitobioside (ACCA); anti-mannobioside (AMCA); anti-laminarin (anti-L); anti-chitin (anti-C) antibodies: anti-outer membrane porin C (anti-OmpC), anti-Cbir1 flagellin; anti-12 antibody; autoantibodies targeting the exocrine pancreas (PAB); and perinuclear antineutrophil antibody (pANCA); and calprotectin.

[1719] In some embodiments, a biomarker is associated with membrane repair, fibrosis, angiogenesis. In certain embodiments, a biomarker is an inflammatory biomarker, an anti-inflammatory biomarker, an MMP biomarker, an immune marker, or a TNF pathway biomarker. In some embodiments, a biomarker is gut specific.

[1720] For tissue samples, HER2 can be used as a biomarker relating to cytotoxic T cells. Additionally, other cytokine levels can be used as biomarkers in tissue (e.g., phospho STAT 1, STAT 3 and STAT 5), in plasma (e.g., VEGF, VCAM, ICAM, IL-6), or both.

[1721] In some embodiments, the target analyte(s) include one or more immunoglobulins, such as, for example, immunoglobulin M (IgM), immunoglobulin D (IgD), immunoglobulin G (IgG), immunoglobulin E (IgE) and/or immunoglobulin A (IgA). In some embodiments, IgM is a biomarker of infection and/or inflammation. In some embodiments, IgD is a biomarker of autoimmune disease. In some embodiments, IgG is a biomarker of Alzheimer's disease and/or for cancer. In some embodiments, IgE is a biomarker of asthma and/or allergen immunotherapy. In some embodiments, IgA is a biomarker of kidney disease.

[1722] In some embodiments, a biomarker or marker of a liver disease or disorder (e.g., any of the liver diseases or disorders described herein) is a bile acid or a bile salt (also known as a conjugated bile acid). Bile acids are products of cholesterol synthesis that are synthesized in the liver, conjugated to taurine or glycine, and stored in the gallbladder until released into the small intestine. The primary bile acids are cholic acid, and chenodeoxycholic acid, which are deconjugated and dehydroxylated by instestinal bacteria to form the secondary bile acids deoxycholic acid and lithocholic acid, respectively. The majority of bile acids (about 95%) are reabsorbed in the distal ileum and returned to the liver (see, e.g., U.S. Publication No. 2017/0343535, incorporated herein by reference). Impaired absorption of bile acids in the ileum can lead to excess bile acids in the colon which can cause symptoms of bile acid malabsorption (BAM; also known as bile acid diarrhea), including watery stool and fecal incontinence. Interestingly, up to 50% of patients with irritable bowel syndrome with diarrhea (IBS-D) also have BAM (see, e.g., Camilleri et al. (2009) Neurogastroeterol. Motil. 21(7): 734-43). In some embodiments, the presence, absence, and/or a specific level of one or more bile acids or bile salts in the GI tract of a subject is indicative of a condition or disease state (e.g., a GI disorder and/or a non-GI disorder (e.g., a systemic disorder or a liver disease)). In some embodiments, the level of at least one bile acid or bile salt in the GI tract of the subject is used to diagnose a GI disorder such as BAM or IBS (e.g., IBS-D). In some embodiments, a level of a bile acid or a bile salt in the GI tract of a subject is determined. For instance, the presence and/or absence, and/or the concentration of a bile acid, a bile salt, or a combination thereof, may be determined at a specific region of the GI tract of a subject (e.g., one or more of the duodenum, jejunum, ileum, ascending colon, transverse colon or descending colon) to determine whether the subject has or is at risk of developing a GI disorder, such as BAM or IBS-D. In some embodiments, the ratio of two or more bile acids or bile acid salts in the GI tract of a subject (e.g., a specific region of the GI tract of a subject including one or more of the duodenum, jejunum, ileum, ascending colon, transverse colon or descending colon) can be determined. In some embodiments, the presence and/or absence, and/or the concentration of a bile acid, a bile salt, or a combination thereof, is determined in the ileum of a subject. In some embodiments, the presence and/or absence, and/or the concentration of a bile acid, a bile salt, or a combination thereof, is determined in the colon of a subject. In some embodiments, the concentration of a bile acid, a bile salt, or a combination thereof, is determined in specific regions of the GI tract of the subject, and for example, compared to determine where along the GI tract the compounds are accumulating. In some embodiments, the detection of a concentration of a bile acid, bile salt, or a combination thereof, in a specific region of the GI tract of the subject (e.g., the colon or the ileum) that is above a reference level of a bile acid, bile salt, or a combination thereof (e.g., the average level of a bile acid in healthy subjects) may be indicative of BAM and/or IBS-D in a subject. In some embodiments, the bile acid is selected from the group consisting of chenodeoxycholic acid, cholic acid, deoxycholate, lithocholate, and ursodeoxycholic acid. In some embodiments, the bile acid comprises cholesten-3-one or a structural variant thereof. In some embodiments, the bile acid is cholesten-3-one or a structural variant thereof. In some embodiments, the bile acid is cholesten-3-one. In some embodiments, the bile acid is a structural variant of cholesten-3-one. In some embodiments, the bile salt is selected from the group consisting of glycocholic acid, taurocholic acid, glycodeoxycholic acid, glycochenodeoxycholic acid, taurodeoxycholic acid, taurochenodeoxycholic acid, glycolithocholic acid, and taurolithocholic acid.

[1723] Another biomarker of a liver disease or disorder is 7α-hydroxy-4-cholesten-3-one (7αC4). The measurement of 7αC4 allows for the monitoring of the enzymatic activity of hepatic cholesterol 7α-hydroxylase, the rate limiting enzyme in the synthesis of bile acids and can be used as a surrogate to detect BAM (see, e.g., Galman et al. (2003) J. Lipid. Res. 44: 859-66; and Camilleri et al. (2009) Neurogastroeterol. Motil. 21(7): 734-43, incorporated herein by reference in their entirety).

[1724] Biomarkers of a liver disease or disorder also include cholesterol, a lipid, a fat soluble vitamin (e.g., ascorbic acid, cholecalciferol, ergocalciferol, a tocopherol, a tocotrienol, phylloquinone, and a menaquinone), bilirubin, fibroblast growth factor 19 (FGF19), TGR5 (also known as GP-BAR1 or M-BAR), glycine, taurine, and cholecystokinin (CCK or CCK-PZ). In some embodiments, a biomarker of a liver disease or disorder is cholecystokinin. Cholecystokinin is a peptide hormone that contributes to control intestinal motility (see Rehfeld (2017) Front. Endocrinol. (Lausanne) 8: 47). In some embodiments, a biomarker of a liver disease or disorder is secretin. Secretin is a peptide hormone that regulates the pH of the duodenal content by controlling gastric acid secretion, regulates bile acid and bicarbonate secretion in the duodenum, and regulates water homeostasis (see, e.g., Afroze et al. (2013) Ann. Transl. Med. 1(3): 29). In some embodiments, a subject has previously been administered cholecystokinin or secretin to induce the release of a biomarker or marker (e.g., from the liver and/or gall bladder into the GI tract).

[1725] An illustrative list of examples of biomarkers that may be used to detect, diagnose, or monitor treatment efficacy for a liver disease or disorder include bilirubin, gamma-glutamyl transferase (GGT), haptoglobin, apolipoprotein A1, alpha2-macroglobulin, cholesterol, triglycerides, alanine aminotransferase (ALT), aspartate aminotransferase (AST), glucose, cytokeratin-18 (CK18) fragment, hyaluronic acid, TGF-β, fatty acid binding protein, hydroxysteroid 17-beta dehydrogenase 13 (17β-HSD13), glutamyl dipeptides, glutamyl valine, glutamyl leucine, glutamyl phenylalanine, glutamyl tyrosine, carnitine, butylcarnitine, lysine, tyrosine, isoleucine, glycerophosphatidylcholine, glycerylphsphorylethanolamine, taurine, glycine conjugates, taurocholic acid, taurodeoxycholic acid, lactate, glutamate, cysteine-gluthatione disulfide, caprate, 10-undecenoate, oleoyl-lysophosphatidylcholine, oxidized and reduced gluthatione, glutamate, andenosine triphosphate, creatine, cholic acid, and glycodeoxycholic acid. In some embodiments, a biomarker of a liver disease or disorder can be a metabolite of any of the markers or biomarkers described herein.

[1726] In some embodiments, the biomarker is High Sensitivity C-reactive Protein (hsCRP); 7 α-hydroxy-4-cholesten-3-one (7C4); Anti-Endomysial IgA (EMA IgA); Anti-Human Tissue Transglutaminase IgA (tTG IgA); Total Serum IgA by Nephelometry; Fecal Calprotectin; or Fecal Gastrointestinal Pathogens.

[1727] In some embodiments, the biomarker is

a) an anti-gliadin IgA antibody, an anti-gliadin IgG antibody, an anti-tissue transglutaminase (tTG) antibody, an anti-endomysial antibody;
b)i) a serological marker that is ASCA-A, ASCA-G, ANCA, pANCA, anti-OmpC antibody, anti-CBir1 antibody, anti-FlaX antibody, or anti-A4-Fla2 antibody;
b)ii) an inflammation marker that is VEGF, ICAM, VCAM, SAA, or CRP;
b)iii) the genotype of the genetic markers ATG16L1, ECM1, NKX2-3, or STAT3;
c) a bacterial antigen antibody marker;
d) a mast cell marker;
e) an inflammatory cell marker;
f) a bile acid malabsorption (BAM) marker;
g) a kynurenine marker;
or
h) a serotonin marker.

[1728] In some embodiments, the bacterial antigen antibody marker is selected from the group consisting of an anti-Fla1 antibody, anti-Fla2 antibody, anti-FlaA antibody, anti-FliC antibody, anti-FliC2 antibody, anti-FliC3 antibody, anti-YBaN1 antibody, anti-ECFliC antibody, anti-Ec0FliC antibody, anti-SeFljB antibody, anti-CjFlaA antibody, anti-CjFaB antibody, anti-SfFliC antibody, anti-CjCgtA antibody, anti-Cjdmh antibody, anti-CjGT-A antibody, anti-EcYidX antibody, anti-EcEra antibody, anti-EcFrvX antibody, anti-EcGabT antibody, anti-EcYedK antibody, anti-EcYbaN antibody, anti-EcYhgN antibody, anti-RtMaga antibody, anti-RbCpaF antibody, anti-RgPilD antibody, anti-LaFrc antibody, anti-LaEno antibody, anti-LjEFTu antibody, anti-BfOmpa antibody, anti-PrOmpA antibody, anti-Cp10bA antibody, anti-CpSpA antibody, anti-EfSant antibody, anti-LmOsp antibody, anti-SfET-2 antibody, anti-Cpatox antibody, anti-Cpbtox antibody, anti-EcSta2 antibody, anti-EcOStx2A antibody, anti-CjcdtB/C antibody, anti-CdtcdA/B antibody, and combinations thereof.

[1729] In some embodiments, the mast cell marker is selected from the group consisting of beta-tryptase, histamine, prostaglandin E2 (PGE2), and combinations thereof.

[1730] In some embodiments, the inflammatory marker is selected from the group consisting of CRP, ICAM, VCAM, SAA, GRO.alpha., and combinations thereof.

[1731] In some embodiments, the bile acid malabsorption marker is selected from the group consisting of 7α-hydroxy-4-cholesten-3-one, FGF19, and a combination thereof.

[1732] In some embodiments, the kynurenine marker is selected from the group consisting of kynurenine (K), kynurenic acid (KyA), anthranilic acid (AA), 3-hydroxykynurenine (3-HK), 3-hydroxyanthranilic acid (3-HAA), xanthurenic acid (XA), quinolinic acid (QA), tryptophan, 5-hydroxytryptophan (5-HTP), and combinations thereof.

[1733] In some embodiments, the serotonin marker is selected from the group consisting of serotonin (5-HT), 5-hydroxyindoleacetic acid (5-HIAA), serotonin-O-sulfate, serotonin-O-phosphate, and combinations thereof.

[1734] In some embodiments, the biomarker is a biomarker as disclosed in U.S. Pat. No. 9,739,786, incorporated by reference herein in its entirety.

[1735] The following markers can be expressed by mesenchymal stem cells (MSC): CD105, CD73, CD90, CD13, CD29, CD44, CD10, Stro-1, CD271, SSEA-4, CD146, CD49f, CD349, GD2, 3G5, SSEA-3, SISD2, Stro-4, MSCA-1, CD56, CD200, PODX1, Sox1l, or TM4SF1 (e.g., 2 or more, 3 or more, 4 or more, 5 or more, 6 or more, 7 or more, 8 or more, 9 or more, or 10 or more of such markers), and lack expression of one or more of CD45, CD34, CD14, CD19, and HLA-DR (e.g., lack expression of two or more, three or more, four or more, or five or more such markers). In some embodiments, MSC can express CD105, CD73, and CD90. In some embodiments, MSC can express CD105, CD73, CD90, CD13, CD29, CD44, and CD10. In some embodiments, MSC can express CD105, CD73, and CD90 and one or more stemness markers such as Stro-1, CD271, SSEA-4, CD146, CD49f, CD349, GD2, 3G5, SSEA-3. SISD2, Stro-4, MSCA-1, CD56, CD200, PODX1, Sox11, or TM4SF1. In some embodiments, MSC can express CD105, CD73, CD90, CD13, CD29, CD44, and CD10 and one or more stemness markers such as Stro-1, CD271, SSEA-4, CD146, CD49f, CD349, GD2, 3G5, SSEA-3. SISD2, Stro-4, MSCA-1, CD56, CD200, PODX1, Sox1l, or TM4SF1. See, e.g., Lv, et al., Stem Cells, 2014, 32:1408-1419.

[1736] Intestinal stem cells (ISC) can be positive for one or more markers such as Musashi-1 (Msi-1), Ascl2, Bmi-1, Doublecortin and Ca2+/calmodulin-dependent kinase-like 1 (DCAMKL1), and Leucin-rich repeat-containing G-protein-coupled receptor 5 (Lgr5). See, e.g., Mohamed, et al., Cytotechnology, 2015 67(2): 177-189.

[1737] Any of the foregoing biomarkers can be used as a biomarker for one or more of other conditions as appropriate.

[1738] In some embodiments of the methods herein, the methods comprise determining the time period of onset of treatment following administration of the device.

### Combination Therapy

[1739] The anti-inflamatory agents disclosed herein may be optionally be used with additional agents in the treatment of the diseases disclosed herein. Nonlimiting examples of such agents for treating or preventing inflammatory bowel disease in such adjunct therapy (e.g., Crohn's disease, ulcerative colitis) include substances that suppress cytokine production, down-regulate or suppress self-antigen expression, or mask the MHC antigens. Examples of such agents include 2-amino-6-aryl-5-substituted pyrimidines (see U.S. Pat. No. 4,665,077); non-steroidal antiinflammatory drugs (NSAIDs); ganciclovir; tacrolimus; lucocorticoids such as Cortisol or aldosterone; immune modulators such as a cyclooxygenase inhibitor; a 5-lipoxygenase inhibitor; or a leukotriene receptor antagonist; purine antagonists such as azathioprine or mycophenolate mofetil (MMF); alkylating agents such as cyclophosphamide; bromocryptine; danazol; dapsone; glutaraldehyde (which masks the MHC antigens, as described in U.S. Pat. No. 4,120,649); anti-idiotypic antibodies for MHC antigens and MHC fragments; cyclosporine; 6-mercaptopurine; steroids such as corticosteroids or glucocorticosteroids or glucocorticoid analogs, e.g., prednisone, methylprednisolone, including SOLU-MEDROL®, methylprednisolone sodium succinate, and dexamethasone; dihydrofolate reductase inhibitors such as methotrexate (oral or subcutaneous); anti-malarial agents such as chloroquine and hydroxychloroquine; sulfasalazine; leflunomide; cytokine or cytokine receptor antibodies or antagonists including anti-interferon-alpha, -beta, or -gamma antibodies, anti-tumor necrosis factor(TNF)-alpha antibodies (infliximab (REMICADE®) or adalimumab), anti-TNF-alpha immunoadhesin (etanercept), anti-TNF-beta antibodies, anti-interleukin-2 (IL-2) antibodies and anti-IL-2 receptor antibodies, and anti-interleukin-6 (IL-6) receptor antibodies and antagonists; anti-LFA-1 antibodies, including anti-CD1 la and anti-CD 18 antibodies; anti-L3T4 antibodies; heterologous anti-lymphocyte globulin; pan-T antibodies, anti-CD3 or anti-CD4/CD4a antibodies; soluble peptide containing a LFA-3 binding domain (WO 90/08187 published Jul. 26, 1990); streptokinase; transforming growth factor-beta (TGF-beta); streptodomase; RNA or DNA from the host; FK506; RS-61443; chlorambucil; deoxyspergualin; rapamycin; T-cell receptor (Cohen et al, U.S. Pat. No. 5,114,721); T-cell receptor fragments (Offner et al, Science, 251: 430-432 (1991); WO 90/11294; Ianeway, Nature, 341: 482 (1989); and WO 91/01133); BAFF antagonists such as BAFF or BR3 antibodies or immunoadhesins and zTNF4 antagonists (for review, see Mackay and Mackay, Trends Immunol, 23: 113-5 (2002) and see also definition below); biologic agents that interfere with T cell helper signals, such as anti-CD40 receptor or anti-CD40 ligand (CD 154), including blocking antibodies to CD40-CD40 ligand. (e.g., Durie et al, Science, 261: 1328-30 (1993); Mohan et al, J. Immunol, 154: 1470-80 (1995)) and CTLA4-Ig (Finck et al, Science, 265: 1225-7 (1994)); and T-cell receptor antibodies (EP 340,109) such as T10B9. Non-limiting examples of adjunct agents also include the following: budenoside; epidermal growth factor; aminosalicylates; metronidazole; mesalamine; olsalazine; balsalazide; antioxidants; thromboxane inhibitors; IL-1 receptor antagonists; anti-IL-1 monoclonal antibodies; growth factors; elastase inhibitors; pyridinyl-imidazole compounds; TNF antagonists; IL-4, IL-1β, IL-13 and/or TGFβ cytokines or agonists thereof (e.g., agonist antibodies); IL-11; glucuronide- or dextran-conjugated prodrugs of prednisolone, dexamethasone or budesonide; ICAM-I antisense phosphorothioate oligodeoxynucleotides (ISIS 2302; Isis Pharmaceuticals, Inc.); soluble complement receptor 1 (TPlO; T Cell Sciences, Inc.); slow-release mesalazine; antagonists of platelet activating factor (PAF); ciprofloxacin; and lignocaine.

[1740] In other embodiments, an immune modulator as described herein can be administered with one or more of: an IL-12/IL-23 inhibitor, a CHST15 inhibitor, a IL-6 receptor inhibitor, a TNF inhibitor, an integrin inhibitor, a JAK inhibitor, a SMAD7 inhibitor, a IL-13 inhibitor, an IL-1 receptor inhibitor, a TLR agonist, an immunosuppressant, or a stem cell. In other embodiments, an immune modulator as described herein can be administered with a vitamin C infusion, one or more corticosteroids, and optionally thiamine.

Examples of particular combinations include the following. Unless otherwise specified, the first component (component (1)) is administered in an ingestible device, while the second component (component (2)) is administered either in an ingestible device, which may be the same or different ingestible device as the first component, or by another form of administration.
(1) Adalimumab; (2) methotrexate.
(1) Adalimumab; (2) methotrexate administered orally.
(1) Vedolizumab; (2) methotrexate.
(1) Vedolizumab; (2) methotrexate administered orally.
(1) Tacrolimus; (2) vedolizumab.
(1) Tacrolimus; (2) vedolizumab in an ingestible device.
(1) Tacrolimus; (2) vedolizumab intravenously or subcutaneously.
(1) A4 inhibitor; (2) Vedolizumab. In some embodiments, the A4 inhibitor is Tysabri.
(1) A4 inhibitor; (2) Vedolizumab in an ingestible device. In some embodiments, the A4 inhibitor is Tysabri.
(1) A4 inhibitor; (2) Vedolizumab subcutaneously. In some embodiments, the A4 inhibitor is Tysabri.
(1) anti-sense VCAM inhibitor; (2) Tysabri.
(1) anti-sense VCAM inhibitor; (2) Tysabri in an ingestible device.
(1) anti-sense VCAM inhibitor; (2) Vedolizumab.
(1) anti-sense VCAM inhibitor; (2) Vedolizumab in an ingestible device.
(1) anti-sense VCAM inhibitor; (2) Vedolizumab intravenously or subcutaneously.
(1) Cyclosporine; (2) vedolizumab.
(1) Cyclosporine; (2) vedolizumab in an ingestible device.
(1) Cyclosporine; (2) vedolizumab intravenously or subcutaneously.
(1) TNF inhibitor; (2) MADCAM inhibitor.
(1) TNF inhibitor; (2) MADCAM inhibitor in an ingestible device.
(1) TNF inhibitor; (2) B7 inhibitor.
(1) B7 inhibitor; TNF inhibitor.
(1) TNF inhibitor; (2) B7 inhibitor in an ingestible device.
(1) B7 inhibitor; TNF inhibitor in an ingestible device.
(1) TNF inhibitor; (2) B7 inhibitor intravenously or subcutaneously.
(1) B7 inhibitor; TNF inhibitor intravenously or subcutaneously.
(1) JAK inhibitor; (2) TNF inhibitor.
(1) JAK inhibitor; (2) TNF inhibitor in an ingestible device.
(1) JAK inhibitor; (2) TNF inhibitor intravenously or subcutaneously.
(1) TNF inhibitor; (2) JAK inhibitor
(1) TNF inhibitor; (2) JAK inhibitor in an ingestible device.
(1) TNF inhibitor; (2) JAK inhibitor orally.
(1) Neoregulin-4; (2) TNF inhibitor.
(1) Neoregulin-4; (2) TNF inhibitor in an ingestible device.
(1) Neoregulin-4; (2) TNF inhibitor intravenously or subcutaneously.
(1) Neoregulin-4; (2) vedolizumab.
(1) Neoregulin-4; (2) vedolizumab in an ingestible device.
(1) Neoregulin-4; (2) vedolizumab intravenously or subcutaneously.

### (1) Neoregulin-4; (2) Stelara®.

[1741] (1) Neoregulin-4; (2) Stelara® in an ingestible device.
(1) Neoregulin-4; (2) Stelara® intravenously or subcutaneously.
(1) Neoregulin-4; (2) JAK inhibitor.
(1) Neoregulin-4; (2) JAK inhibitor in an ingestible device.
(1) Neoregulin-4; (2) JAK inhibitor intravenously or subcutaneously.
(1) TNF inhibitor; (2) SiP inhibitor. In some embodiments, the S1P inhibitor is ozanimod or etrasimod.
(1) TNF inhibitor; (2) S1P inhibitor orally. In some embodiments, the S1P inhibitor is ozanimod or etrasimod.
(1) Stelara®; (2) S1P inhibitor. In some embodiments, the S1P inhibitor is ozanimod or etrasimod.
(1) Stelara®; (2) S1P inhibitor orally. In some embodiments, the S1P inhibitor is ozanimod or etrasimod.
(1) Vedolizumab; (2) S1P inhibitor. In some embodiments, the S1P inhibitor is ozanimod or etrasimod.
(1) Vedolizumab; (2) S1P inhibitor orally. In some embodiments, the S1P inhibitor is ozanimod or etrasimod.

[1742] In some embodiments, the methods disclosed herein comprise administering (i) the immune modulator as disclosed herein, and (ii) a second agent orally, intravenously or subcutaneously, wherein the second agent in (ii) is the same immune modulator in (i); a different immune modulator; or an agent having a different biological target from the immune modulator.

[1743] In some embodiments, the methods disclosed herein comprise administering (i) the immune modulator in the manner disclosed herein, and (ii) a second agent orally, intravenously or subcutaneously, wherein the second agent in (ii) is an agent suitable for treating an inflammatory bowel disease.

[1744] In some embodiments, the immune modulator is administered prior to the second agent. In some embodiments, the immune modulator is administered after the second agent. In some embodiments, the immune modulator and the second agent are administered substantially at the same time. In some embodiments, the immune modulator is delivered prior to the second agent. In some embodiments, the immune modulator is delivered after the second agent. In some embodiments, the immune modulator and the second agent are delivered substantially at the same time.

[1745] In some embodiments, the second agent is an agent suitable for the treatment of an inflammatory disease or condition that arises in a tissue originating from the endoderm. In some embodiments, the second agent is administered intravenously. In some embodiments, the second agent is administered subcutaneously.

[1746] In some embodiments, delivery of the immune modulator to the location, such as delivery to the location by mucosal contact, results in systemic immunogenicity levels at or below systemic immunogenicity levels resulting from administration of the immune modulator systemically. In some embodiments comprising administering the immune modulator in the manner disclosed herein and a second agent systemically, delivery of the immune modulator to the location, such as delivery to the location by mucosal contact, results in systemic immunogenicity levels at or below systemic immunogenicity levels resulting from administration of the immune modulator systemically and the second agent systemically. In some embodiments, the method comprises administering the immune modulator in the manner disclosed herein and a second agent, wherein the amount of the second agent is less than the amount of the second agent when the immune modulator and the second agent are both administered systemically.

### EXAMPLES

### Example 1—Preclinical Murine Colitis Model

### Experimental Induction of Colitis

[1747] Colitis is experimentally induced to mice via the dextran sulfate sodium (DSS)-induced colitis model. This model is widely used because of its simplicity and many similarities with human ulcerative colitis. Briefly, mice are subjected to DSS via cecal catheterization, which is thought to be directly toxic to colonic epithelial cells of the basal crypts, for several days until colitis is induced.

### Groups

[1748] Mice are allocated to one of seven cohorts, depending on the agent that is administered:
[1749] 1. Control (no agent)
[1750] 2. Adalimumab (2.5 mg/kg)
[1751] 3. Adalimumab (5 mg/kg)
[1752] 4. Adalimumab (10 mg/kg)

[1753] The control or agent is applied to a damaged mucosal surface of the bowel via administration through a cecal catheter at the dose levels described above.

[1754] Additionally, for each cohort, the animals are separated into two groups. One group receives a single dose of the control or agent on day 10 or 12. The other group receives daily (or similar) dosing of the control or agent.

### Analysis

[1755] For each animal, efficacy is determined (e.g., by endoscopy, histology, etc.), and cytotoxic T-cell levels are determined in blood, feces, and tissue (tissue levels are determined after animal sacrifice). For tissue samples, levels HER2 are additionally determined, and the level of cytotoxic T cells is normalized to the level of HER2. Additionally, other cytokine levels are determined in tissue (e.g., phospho STAT 1, STAT 3 and STAT 5), in plasma (e.g., VEGF, VCAM, ICAM, IL-6), or both.

[1756] Pharmacokinetics are determined both systemically (e.g., in the plasma) and locally (e.g., in colon tissue). For systemic pharmacokinetic analysis, blood and/or feces is collected from the animals at one or more timepoints after administration (e.g., plasma samples are collected at 15 minutes, 30 minutes, 1 hour, 2 hours, 4 hours, and/or 8 hours after administration). Local/colon tissue samples are collected once after animal sacrifice.

### Example 2a—Development of Preclinical Porcine Colitis Model

### Experimental Induction of Colitis

[1757] Female swine weighing approximately 35 to 45 kg at study start are fasted at least 24 hours prior to intra-rectal administration of trinitrobenzene sulfonic acid (TNBS). Animals are lightly anesthetized during the dosing and endoscopy procedure. An enema to clean the colon is used, if necessary. One animal is administered 40 ml of 100% EtOH mixed with 5 grams of TNBS diluted in 10 ml of water via an enema using a ball-tipped catheter. The enema is deposited in the proximal portion of the descending colon just past the bend of the transverse colon. The TNBS is retained at the dose site for 12 minutes by use of two Foley catheters with 60-ml balloons placed in the mid-section of the descending colon below the dose site. A second animal is similarly treated, but with a solution containing 10 grams of TNBS. An Endoscope is employed to positively identify the dose site in both animals prior to TNBS administration. Dosing and endoscopy are performed by a veterinary surgeon

[1758] Seven (7) days after TNBS administration, after light anesthesia, the dose site and mucosal tissues above and below the dose site are evaluated by the veterinary surgeon using an endoscope. Pinch Biopsies are obtained necessary, as determined by the surgeon. Based on the endoscopy findings, the animals may be euthanized for tissue collection on that day, or may proceed on study pending the results of subsequent endoscopy exams for 1 to 4 more days. Macroscopic and microscopic alterations of colonic architecture, possible necrosis, thickening of the colon, and substantial histologic changes are observed at the proper TNBS dose.

[1759] Clinical signs (e.g., ill health, behavioral changes, etc.) are recorded at least daily during acclimation and throughout the study. Additional pen-side observations are conducted twice daily (once-daily on weekends). Body weight is measured for both animals Days 1 and 7 (and on the day of euthanasia if after Day 7).

[1760] On the day of necropsy, the animals are euthanized via injection of a veterinarian-approved euthanasia solution. Immediately after euthanasia in order to avoid autolytic changes, colon tissues are collected, opened, rinsed with saline, and a detailed macroscopic examination of the colon is performed to identify macroscopic finings related to TNBS-damage. Photos are taken. Tissue samples are taken from the proximal, mid, and distal transverse colon; the dose site; the distal colon; the rectum; and the anal canal. Samples are placed into NBF and evaluated by a board certified veterinary pathologist.

### Example 2b—Pharmacokinetic/Pharmacodynamic and Bioavailability of Adalimumab After Topical Application

### Groups

[1761] Sixteen (16) swine (approximately 35 to 45 kg at study start) are allocated to one of five groups:

[1762] 1. Vehicle Control: (3.2 mL saline); intra-rectal; (n=2)

[1763] 2. Treated Control: Adalimumab (40 mg in 3.2 mL saline); subcutaneous; (n=2)

[1764] 3. Adalimumab (low): Adalimumab (40 mg in 3.2 mL saline); intra-rectal; (n=4)

[1765] 4. Adalimumab (med): Adalimumab (80 mg in 3.2 mL saline); intra-rectal; (n=4)

[1766] 5. Adalimumab (high): Adalimumab (160 mg in 3.2 mL saline); intra-rectal; (n=4)

[1767] On Day 0, the test article is applied to a damaged mucosal surface of the bowel via intra-rectal administration or subcutaneous injection by a veterinary surgeon at the dose levels and volume described above.

### Clinical Observations and Body Weight

[1768] Clinical observations are conducted at least once daily. Clinical signs (e.g., ill health, behavioral changes, etc.) are recorded on all appropriate animals at least daily prior to the initiation of experiment and throughout the study until termination. Additional clinical observations may be performed if deemed necessary. Animals whose health condition warrants further evaluation are examined by a Clinical Veterinarian. Body weight is measured for all animals Days −6, 0, and after the last blood collections.

### Samples

[1769] Blood:

[1770] Blood is collected (cephalic, jugular, and/or catheter) into EDTA tubes during acclimation on Day-7, just prior to dose on Day 0, and 0.5, 1, 2, 4, 6, 8, 12, 24, and 48 hours post-dose. The EDTA samples are split into two aliquots and one is centrifuged for pharmacokinetic plasma and either analyzed immediately, or stored frozen (−80° C.) for later pharmacokinetic analyses. The remaining sample of whole blood is used for pharmacodynamic analyses.

[1771] Feces:

[1772] Feces is collected Day −7, 0 and 0.5, 1, 2, 4, 6, 8, 12, 24 and 48 hours post-dose, and either analyzed immediately, or flash-frozen on liquid nitrogen and stored frozen at −70° C. pending later analysis of drug levels and inflammatory cytokines.

[1773] Tissue:

[1774] Immediately after euthanasia in order to avoid autolytic changes, colon tissues are collected, opened, rinsed with saline, and a detailed macroscopic examination of the colon is performed to identify macroscopic finings related to TNBS-damage. Triplicate samples of normal and damaged tissues are either analyzed immediately, or are flash-frozen on liquid nitrogen and stored frozen at −70° C. pending later analysis of drug concentration, inflammatory cytokines and histology.

[1775] Samples are analyzed for adalimumab levels (local mucosal tissue levels and systemic circulation levels), and for levels of inflammatory cytokines including TNF-alpha.

### Terminal Procedures

[1776] Animals are euthanized as per the schedule in Table AA, where one animal each of Vehicle and Treated Control groups is euthanized at 6 and 48 hours post-dose, and one animal of each the adalimumab groups are euthanized at 6, 12, 24 and 48 hours post-dose. Animals are discarded after the last blood collection unless retained for a subsequent study.

TABLE AA

| | Sample | | | Days | | | | | | | | Hours | | | | | | | | |
|---|---|---|---|---|---|---|---|---|---|---|---|---|---|---|---|---|---|---|---|---|
| General | size | Dose | Route | −7 | −6 | −5 | −4 | −3 | −2 | −1 | 0 | 0.5 | 1 | 2 | 4 | 6 | 8 | 12 | 24 | 48 |
| Fast | | | | • | | | | | | | | | | | | | | | | |
| Food/Water | | ad | oral | | • | • | • | • | • | • | • | • | • | • | • | • | • | • | • | • |
| | | libidum | | | | | | | | | | | | | | | | | | |
| Observations | | | | | | | | | | | | | | | | | | | | |
| clinical observations | | | | • | • | • | • | • | • | • | • | | | | | | | | • | • |
| body weight | | | | • | | | | | | | • | | | | | | | | • | • |
| Treatments (groups) | | | | | | | | | | | | | | | | | | | | |
| TNBS | | | intra | | • | | | | | | | | | | | | | | | |
| (all animals) | | | rectal | | | | | | | | | | | | | | | | | |
| 1. Vehicle control | n = 2 | 1.6 mL | intra | | | | | | | | • | | | | | | | | | |
| | | saline | rectal | | | | | | | | | | | | | | | | | |
| | | (vehicle) | | | | | | | | | | | | | | | | | | |
| euthanized | | | | | | | | | | | | | | | | n = 1 | | | | n = 1 |
| 2. Treated control | n = 2 | 40 mg in | sub- | | | | | | | | • | | | | | | | | | |
| | | 1.6 mL | cutaneous | | | | | | | | | | | | | | | | | |
| | | saline | | | | | | | | | | | | | | | | | | |
| euthanized | | | | | | | | | | | | | | | | n = 1 | | | | n = 1 |
| 3. Adalimumab (low) | n = 4 | 40 mg in | intra | | | | | | | | • | | | | | | | | | |
| | | 1.6 mL | rectal | | | | | | | | | | | | | | | | | |
| | | saline | | | | | | | | | | | | | | | | | | |
| euthanized | | | | | | | | | | | | | | | | n = 1 | | n = 1 | n = 1 | n = 1 |
| 4. Adalimumab (med) | n = 4 | 80 mg in | intra | | | | | | | | • | | | | | | | | | |
| | | 1.6 mL | rectal | | | | | | | | | | | | | | | | | |
| | | saline | | | | | | | | | | | | | | | | | | |
| euthanized | | | | | | | | | | | | | | | | n = 1 | | n = 1 | n = 1 | n = 1 |
| 5. Adalimumab (high) | n = 4 | 160 mg in | intra | | | | | | | | • | | | | | | | | | |
| | | 1.6 mL | rectal | | | | | | | | | | | | | | | | | |
| | | saline | | | | | | | | | | | | | | | | | | |
| euthanized | | | | | | | | | | | | | | | | n = 1 | | n = 1 | n = 1 | n = 1 |
| Adalimumab (required) | | 1200 | | | | | | | | | | | | | | | | | | |
| Samples | | | | | | | | | | | | | | | | | | | | |
| Blood | | | cephalic, | • | | | | | | | • | • | • | • | • | • | • | • | • | • |
| | | | jugular or | | | | | | | | | | | | | | | | | |
| | | | catheter | | | | | | | | | | | | | | | | | |
| Fecal | | | rectal | • | | | | | | | • | • | • | • | • | • | • | • | • | • |
| Tissue | | | necropsy | • | | | | | | | | | | | | • | | • | • | • |

### Example 2c—Pharmacokinetic/Pharmacodynamic and Bioavailability of Adalimumab after Topical Application

### Groups

[1777] DSS-induced colitis Yorkshire-Cross Farm Swine (approximately 5-10 kg at study start) are allocated to one of five groups:
[1778] 1. Vehicle Control: (saline); intra-rectal;
[1779] 2. Treated Control: Adalimumab (13 mg in saline); subcutaneous;
[1780] 3. Adalimumab: Adalimumab (13 mg in saline); intra-rectal;

[1781] At t=0, the test article is applied to a damaged mucosal surface of the bowel via intra-rectal administration or subcutaneous injection by a veterinary surgeon at the dose levels and volume described above.

### Clinical Observations

[1782] Clinical signs (e.g., ill health, behavioral changes, etc.) are recorded on all appropriate animals at least daily prior to the initiation of experiment and throughout the study until termination. Additional clinical observations may be performed if deemed necessary. Animals whose health condition warrants further evaluation are examined by a Clinical Veterinarian.

### Samples

[1783] Blood:

[1784] Blood is collected (cephalic, jugular, and/or catheter) into EDTA tubes during acclimation on Day-7, just prior to dose on Day 0, and 12 hours post-dose. The EDTA samples are split into two aliquots and one is centrifuged for pharmacokinetic plasma and either analyzed immediately, or stored frozen (−80° C.) for later pharmacokinetic analyses. The remaining sample of whole blood is used for pharmacodynamic analyses.

[1785] Feces:

[1786] Feces is collected Day −7, 0 and 12 hours post-dose, and either analyzed immediately, or flash-frozen on liquid nitrogen and stored frozen at −70° C. pending later analysis of drug levels and inflammatory cytokines.

[1787] Tissue:

[1788] Immediately after euthanasia (12 hours after dosing) in order to avoid autolytic changes, colon tissues are collected, opened, rinsed with saline, and a detailed macroscopic examination of the colon is performed to identify macroscopic finings related to DSS-damage. Triplicate samples of normal and damaged tissues are either analyzed immediately, or are flash-frozen on liquid nitrogen and stored frozen at −70° C. pending later analysis of drug concentration, inflammatory cytokines and histology.

[1789] Samples are analyzed for adalimumab levels (local mucosal tissue levels and systemic circulation levels), and for levels of inflammatory cytokines including TNF-alpha.

### Terminal Procedures

[1790] Animals are euthanized at 12 hours post-dose.

### Example 3. Comparison of Systemic versus Intracecal Delivery of an Anti-IL-12 Antibody

[1791] The objective of this study was to compare the efficacy of an IL-12 inhibitor (anti-IL-12 p40; anti-p40 mAb; BioXCell (Cat #: BE0051)), when dosed systemically versus intracecally, to the treat dextran sulfate sodium salt (DSS)-induced colitis in male C57Bl/6 mice.

### Materials and Methods

### Mice

[1792] Normal male C57Bl/6 mice between the ages of 6-8 weeks old, weighing 20-24 g, were obtained from Charles River Laboratories. The mice were randomized into thirteen groups of twelve animals and two groups of eight animals, and housed in groups of 6-8 per cage, and acclimatized for at least three days prior to entering the study. Animal rooms were set to maintain a minimum of 12 to 15 air changes per hour, with an automatic timer for a light/dark cycle of 12 hours on/off, and fed with Labdiet 5053 sterile rodent chow, with water administered ad libitum.

### Cecal Cannulation

[1793] Animals were placed under isoflurane anesthesia, with the cecum exposed via a midline incision in the abdomen. A small point incision was made in the distal cecum where 1-2 cm of the cannula was inserted. The incision was closed with a purse string suture using 5-0 silk. An incision was then made in the left abdominal wall through which the distal end of the cannula was inserted and pushed subcutaneously to the dorsal aspect of the back. The site was then washed copiously with warmed saline prior to closing the abdominal wall. A small incision was also made in the skin of the back between the shoulder blades, exposing the tip of the cannula. The cannula was secured in place using suture, wound clips, and tissue glue. All animals received 1 mL of warm sterile saline (subcutaneous injection) and were monitored closely until recovery before returning to their cage. All animals received 0.6 mg/kg BID buprenorphine for the first 3 days, and Baytril® at 10 mg/Kg every day for the first 5 days post surgery.

### Induction of Colitis

[1794] Colitis was induced in male C57Bl/6 mice by exposure to 3% DSS drinking water (MP Biomedicals #0260110) from Day 0 to Day 5. Fresh DSS/water solutions were made again on Day 3 and any of the remaining original DSS solution will be discarded.

### Assessment of Colitis

[1795] All animals were weighed daily and visually assessed for the presence of diarrhea and/or bloody stool at the time of dosing. The mice underwent two video endoscopies, one on day 10 and one on day 14, to assess colitis severity. Images were captured from each animal at the most severe region of disease identified during the endoscopy, and assessed using the rubric demonstrated in Table 1.1. Additionally, stool consistency was scored during the endoscopy using this rubric (Table 1.2) (0=Normal, well-formed pellet, 1=Loose stool, soft, staying in shape, 2=Loose stool, abnormal form with excess moisture, 3=Watery or diarrhea, 4=Bloody diarrhea). At necropsy, intestinal contents, peripheral blood, and tissue, and cecum/colon contents were collected for analysis.

TABLE 1.1
Endoscopy Scoring

| Score | Description of Endoscopy Score |
|---|---|
| 0 | Normal |
| 1 | Loss of vascularity |
| 2 | Loss of vascularity and friability |
| 3 | Friability and erosions |
| 4 | Ulcerations and bleeding |

TABLE 1.2
Stool Consistency Score

| Score | Description of Stool Consistency |
|---|---|
| 0 | Normal, well-formed pellet |
| 1 | Loose stool, soft, staying in shape |
| 2 | Loose stool, abnormal form with excess moisture |
| 3 | Watery or diarrhea |
| 4 | Bloody diarrhea |

### Treatment of Colitis

[1796] Mice were treated with anti-IL-12 p40 during the acute phase of colitis due to its efficacy in the treatment of DSS-induced colitis. The test article was dosed at a volume of 0.1 mL/20 g from days 0 to 14. Anti-IL-12 p40 was administered intraperitoneally at a dose of 10 mg/kg every days, and intracecally at a dose of 10 mg/kg, either every 3 days or every day. There was also a lower dose of 1 mg/kg given every day intracecally. The control groups were not administered drugs, and the vehicles (sterile PBS) were administered the placebo drug intraperitoneally and intracecally every day. These drugs were given from days 5-14, which is 9 days of administration. A more detailed explanation of dosing and groups can be seen in Table 1.3.

TABLE 1.3
Groups of Animals

| | # of | | Cecal | | Dose | | Dosing |
|---|---|---|---|---|---|---|---|
| Group # | Animals | DSS | Cannula | Treatment | (mg/kg) | Route | Schedule |
| 1 | 8 males | — | NO | — | — | — | — |
| 2 | 8 males | — | YES | — | — | — | — |
| 3 | 12 males | 3% DSS | NO | Vehicle | — | PO | QD |
| | | (day 0-5) | | | | | day 0-14 |
| 4 | 12 males | 3% DSS | YES | Vehicle | — | IC | QD |
| | | (day 0-5) | | | | | day 0-14 |
| 5 | 12 males | 3% DSS | NO | Anti-p40 | 10 | IP | Q3 |
| | | (day 0-5) | | | | | 0, 3, 6, 9, 12 |
| 6 | 12 males | 3% DSS | YES | Anti-p40 | 10 | IC | Q3 |
| | | (day 0-5) | | | | | 0, 3, 6, 9, 12 |
| 7 | 12 males | 3% DSS | YES | Anti-p40 | 10 | IC | QD |
| | | (day 0-5) | | | | | day 0-14 |
| 8 | 12 males | 3% DSS | YES | Anti-p40 | 1 | IC | QD |
| | | (day 0-5) | | | | | day 0-14 |

### Sample Collection

[1797] Intestinal contents, peripheral blood, and tissue were collected at sacrifice on day 14, as follows: at the end of each study period, mice were euthanized by CO₂ inhalation immediately following endoscopy on day 14. The blood was collected via cardiac puncture into K₂EDTA-coated tubes and centrifuged at 4000×g for 10 minutes. The blood cell pellet was retained and snapped frozen. The resulting plasma was then split into two separate cryotubes, with 100 μL in one tube and the remainder in the second. Plasma and cell pellet were also collected, flash frozen, and stored at −80 degrees Celsius.

[1798] The cecum and colon were removed from each animal and contents were collected, weighed, and snap frozen in separate cryovials. The colon was excised, rinsed, measured, weighed, and then trimmed to 6 cm in length and divided into 5 pieces. The most proximal 1 cm of colon was snapped frozen for subsequent bioanalysis of test article levels. Of the remaining 5 cm of colon, the most distal and proximal 1.5-cm sections was placed in formalin for 24 hours then transferred to 70% ethanol for subsequent histological evaluation. The middle 2-cm portion was bisected longitudinally and placed into two separate cryotubes, weighed, and snap frozen in liquid nitrogen.

### Results

[1799] The data in FIG. 30 show that the DSS mice that were intracecally administered an anti-IL-12 p40 (IgG2A) antibody had decreased weight loss as compared to DSS mice that were intraperitoneally administered the anti-IL-12 p40 antibody.

[1800] The data in FIG. 31 show that the plasma concentration of the anti-IL-12 p40 antibody was decreased in DSS mice that were intracecally administered the anti-IL-12 p40 antibody as compared to DSS mice that were intraperitoneally administered the anti-IL-12 p40 antibody. The data in FIG. 32 show that the cecum and colon concentration of the anti-IL-12 p40 antibody is increased in DSS mice that were intracecally administered the anti-IL-12 p40 antibody as compared to the DSS mice that were intraperitoneally administered the anti-IL-12 p40 antibody.

[1801] The data in FIGS. 33 and 34 show that the anti-IL-12 p40 antibody is able to penetrate colon tissues (the lumen superficial, lamina propria, submucosa, and tunica muscularis/serosa) in DSS mice intracecally administered the anti-IL-12 p40 antibody, while the anti-IL-12 p40 antibody did not detectably penetrate the colon tissues of DSS mice intraperitoneally administered the anti-IL-12 p40 antibody. The data in FIG. 35 also show that the ratio of the concentration of anti-IL-12 p40 antibody in colon tissue to the concentration of the anti-IL-12 p40 antibody in plasma is increased in DSS mice intracecally administered the anti-IL-12 p40 antibody as compared to the ratio in DSS mice intraperitoneally administered the anti-IL-12 p40 antibody.

[1802] The data in FIG. 36 show that the concentration of IL-1 in colon tissue is decreased in DSS mice intracecally administered the anti-IL-12 p40 antibody as compared to the concentration of IL-1β in colon tissue in DSS mice intraperitoneally administered the anti-IL-12 p40 antibody. The data in FIG. 37 show that the concentration of IL-6 in colon tissue is decreased in DSS mice intracecally administered the anti-IL-12 p40 antibody as compared to the concentration of IL-6 in colon tissue in DSS mice intraperitoneally administered the anti-IL-12 p40 antibody. The data in FIG. 38 show that the concentration of IL-17A in colon tissue is decreased in DSS mice intracecally administered the anti-IL-12 p40 antibody as compared to the concentration of IL-17A in colon tissue in DSS mice intraperitoneally administered the anti-IL-12 p40 antibody.

[1803] No significant differences in clinical observations or gastrointestinal-specific adverse effects, including stool consistency and/or bloody stool, were observed due to cannulation or intra-cecal treatments when compared with vehicle. No toxicity resulting from the treatments was reported. A significant reduction in body weight-loss (AUC) was found in groups treated with anti-IL-12 p40 antibody (10 mg/kg and 1 mg/kg, QD) via intra-cecal delivery when compared with vehicle control and intraperitoneal delivery (10 mg/kg, Q3D). The immunohistochemistry staining in anti-IL-12 p40 antibody (10 mg/kg, QD) treatment groups showed penetration of the antibody in all layers of colon tissue, including lumen mucosa, lamina propria, submucosa, tunica muscularis, via intra-cecal delivery. The distribution of anti-IL-12 p40 antibody was found in all segments of the colon, however, higher levels were detected in the proximal region. A significantly higher mean concentration of anti-IL-12 p40 antibody was found in the gastrointestinal contents and colon tissues when delivered via intra-cecal administration (Anti-p40: 10 mg/kg and 1 mg/kg, QD) compared with intraperitoneal administration (anti-p40: 10 mg/kg, Q3D). The blood level of anti-IL-12 p40 antibody was significantly higher when delivered via intraperitoneal administration (Q3D) as compared to intra-cecal administration (Q3D & QD). The concentrations of inflammatory cytokines, including IL-1β, IL-6, and IL-17, were significantly reduced by anti-IL-12 p40 antibody (10 mg/kg, QD) treatment when delivered via intra-cecal administration as compared to vehicle controls.

[1804] In sum, these data show that the compositions and devices provided herein can suppress the local immune response in the intestine, while having less of a suppressive effect on the systemic immune response of an animal. These data also suggest that the presently claimed compositions and devices will provide for treatment of colitis and other pro-inflammatory disorders of the intestine.

### Example 4. Comparison of Systemic Versus Intracecal Delivery of an Anti-Integrin α4β7 Antibody

[1805] The objective of this study was to compare the efficacy of an integrin inhibitor (anti-integrin α4β7; anti-LPAM1; DATK-32 mAb; BioXCell (Cat #: BE0034)) when dosed systemically versus intracecally for treating dextran sulfate sodium salt (DSS)-induced colitis in male C57Bl/6 mice.

### Materials and Methods

### Mice

[1806] Normal male C57Bl/6 mice between the ages of 6-8 weeks old, weighing 20-24 g, were obtained from Charles River Laboratories. The mice were randomized into thirteen groups of twelve animals and two groups of eight animals, and housed in groups of 6-8 per cage, and acclimatized for at least three days prior to entering the study. Animal rooms were set to maintain a minimum of 12 to 15 air changes per hour, with an automatic timer for a light/dark cycle of 12 hours on/off, and fed with Labdiet 5053 sterile rodent chow, with water administered ad libitum.

### Cecal Cannulation

[1807] The animals were placed under isoflurane anesthesia, with the cecum exposed via a midline incision in the abdomen. A small point incision was made in the distal cecum where 1-2 cm of the cannula was inserted. The incision was closed with a purse string suture using 5-0 silk. An incision was then made in the left abdominal wall through which the distal end of the cannula was inserted and pushed subcutaneously to the dorsal aspect of the back. The site was then washed copiously with warmed saline prior to closing the abdominal wall. A small incision was also made in the skin of the back between the shoulder blades, exposing the tip of the cannula. The cannula was secured in place using suture, wound clips, and tissue glue. All animals received 1 mL of warm sterile saline (subcutaneous injection) and were monitored closely until recovery before returning to their cage. All animals received 0.6 mg/kg BID buprenorphine for the first 3 days, and Baytril® at 10 mg/Kg every day for the first 5 days post-surgery.

### Induction of Colitis

[1808] Colitis was induced in male C57Bl/6 mice by exposure to 3% DSS drinking water (MP Biomedicals #0260110) from day 0 to day 5. Fresh DSS/water solutions were made again on day 3 and any of the remaining original DSS solution will be discarded.

### Assessment of Colitis

[1809] All animals were weighed daily and visually assessed for the presence of diarrhea and/or bloody stool at the time of dosing. Mice underwent two video endoscopies, one on day 10 and one on day 14, to assess colitis severity. Images were captured from each animal at the most severe region of disease identified during the endoscopy, and assessed using the rubric demonstrated in Table 2.1. Additionally, stool consistency was scored during the endoscopy using this rubric (Table 2.2) (0=Normal, well-formed pellet, 1=Loose stool, soft, staying in shape, 2=Loose stool, abnormal form with excess moisture, 3=Watery or diarrhea, 4=Bloody diarrhea). At necropsy, intestinal contents, peripheral blood and tissue, and cecum/colon contents were collected for analysis.

TABLE 2.1
Endoscopy Score

| Score | Description of Endoscopy Score |
|---|---|
| 0 | Normal |
| 1 | Loss of vascularity |
| 2 | Loss of vascularity and friability |
| 3 | Friability and erosions |
| 4 | Ulcerations and bleeding |

TABLE 2.2
Stool Consistency Score

| Score | Description of Stool Consistency |
|---|---|
| 0 | Normal, well-formed pellet |
| 1 | Loose stool, soft, staying in shape |
| 2 | Loose stool, abnormal form with excess moisture |
| 3 | Watery or diarrhea |
| 4 | Bloody diarrhea |

### Treatment of Colitis

[1810] Mice were treated with DATK32 during the acute phase of colitis due to its efficacy in the treatment of DSS-induced colitis. The test article was dosed at a volume of 0.1 mL/20 g from days 0 to 14. DATK32 was administered intraperitoneally at a dose of 25 mg/kg every 3 days, and intracecally at a dose of 25 mg/kg, either every 3 days or every day. There was also a lower dose of 5 mg/kg given every day intracecally. The control groups were not administered drugs, and the vehicle (sterile PBS) was administered as the placebo drug intraperitoneally and intracecally every day. These drugs were given from days 5-14, which is 9 days of administration. A more detailed explanation of dosing and groups can be seen in Table 2.3.

TABLE 2.3
Groups of Mice

| | # of | | Cecal | | Dose | | Dosing |
|---|---|---|---|---|---|---|---|
| Group # | Animals | DSS | Cannula | Treatment | (mg/kg) | Route | Schedule |
| 1 | 8 males | — | NO | — | — | — | — |
| 2 | 8 males | — | YES | — | — | — | — |
| 3 | 12 males | 3% DSS | NO | Vehicle | — | PO | QD |
| | | (day 0-5) | | | | | day 0-14 |
| 4 | 12 males | 3% DSS | YES | Vehicle | — | IC | QD |
| | | (day 0-5) | | | | | day 0-14 |
| 9 | 12 males | 3% DSS | NO | DATK32 | 25 | IP | Q3 |
| | | (day 0-5) | | | | | 0, 3, 6, 9, 12 |
| 10 | 12 males | 3% DSS | YES | DATK32 | 25 | IC | Q3 |
| | | (day 0-5) | | | | | 0, 3, 6, 9, 12 |
| 11 | 12 males | 3% DSS | YES | DATK32 | 25 | IC | QD |
| | | (day 0-5) | | | | | day 0-14 |
| 12 | 12 males | 3% DSS | YES | DATK32 | 5 | IC | QD |
| | | (day 0-5) | | | | | day 0-14 |

### Sample Collection

[1811] Intestinal contents, peripheral blood, and tissue were collected at sacrifice on day 14, as follows: at the end of each study period, mice were euthanized by CO₂ inhalation immediately following endoscopy on day 14. The blood was collected via cardiac puncture into K₂EDTA-coated tubes and centrifuged at 4000×g for 10 minutes. The blood cell pellet was retained and snapped frozen. The resulting plasma was then split into two separate cryotubes, with 100 μL in one tube and the remainder in the second. Plasma and the cell pellet were also collected, flash frozen, and stored at −80 degrees Celsius. An ELISA was used to determine the level of rat IgG2A.

[1812] The cecum and colon were removed from each animal and contents were collected, weighed, and snap frozen in separate cryovials. The colon was excised, rinsed, measured, weighed, and then trimmed to 6 cm in length and divided into 5 pieces. The most proximal 1 cm of colon was snapped frozen for subsequent bioanalysis of anti-DATK32 levels. Of the remaining 5 cm of colon, the most distal and proximal 1.5-cm sections was placed in formalin for 24 hours then transferred to 70% ethanol for subsequent histological evaluation. The middle 2-cm portion was bisected longitudinally and placed into two separate cryotubes, weighed, and snap frozen in liquid nitrogen.

[1813] There was an additional collection of 100 μL of whole blood from all animals and processed for FACS analysis of α4 and β7 expression on T-helper memory cells. Tissue and blood were immediately placed in FACS buffer (lx PBS containing 2.5% fetal calf serum) and analyzed using the following antibody panel (Table 2.4).

TABLE 2.4
Fluorophore Labelled Antibodies Used in FACS Analysis

| Antibody Target | Flurochrome | Purpose |
|---|---|---|
| CD4 | APC-Vio770 | Defines T-Helper Cells |
| CD44 | VioBlue | Memory/Naive |
| | | Discrimination |
| CD45RB | FITC | Memory/Naive |
| | | Discrimination |
| α4 | APC | Defines T-helper memory |
| | | subset of interest |
| β7 | PE | Defines T-helper memory |
| | | subset of interest |
| CD16/32 | — | Fc Block |

### Results

[1814] The data in FIG. 39 show decreased weight loss in DSS mice intracecally administered DATK antibody as compared to DSS mice that were intraperitoneally administered the DATK antibody. The data in FIG. 40 show that DSS mice intracecally administered DATK antibody have a decreased plasma concentration of DATK antibody as compared to DSS mice that were intraperitoneally administered DATK antibody. The data in FIGS. 41 and 42 show that DSS mice intracecally administered DATK antibody have an increased concentration of DATK antibody in the cecum and colon content as compared to DSS mice intraperitoneally administered DATK antibody. The data in FIGS. 43 and 44 show that DSS mice intracecally administered DATK antibody have an increased concentration of DATK antibody in colon tissue as compared to DSS mice intraperitoneally administered DATK antibody. The data in FIGS. 45 and 46 show an increased level of penetration of DATK antibody into colon tissue in DSS mice intracecally administered the DATK antibody as compared to an intracecal vehicle control (PBS). The data in FIG. 47 show that DSS mice intracecally administered DATK antibody have an increased ratio of the concentration of DATK antibody in colon tissue to the plasma concentration of the DATK antibody, as compared to the same ratio in DSS mice intraperitoneally administered the DATK antibody.

[1815] The data in FIG. 48 show that DSS mice intracecally administered the DATK antibody have an increased percentage of blood Th memory cells as compared to DSS mice intraperitoneally administered the DATK antibody.

[1816] No significant differences in clinical observations or gastrointestinal-specific adverse effects, including stool consistency and/or bloody stool, were observed due to cannulation or intra-cecal treatments when compared with vehicle. No toxicity resulting from the treatments was reported. A significant reduction in body weight-loss was also found with DATK32 (5 mg/kg, QD) treatment (IC) when compared to vehicle control at the endpoint (day 14). The immunohistochemistry staining in DATK32 (25 mg/kg, QD) treatment groups showed penetration of DATK32 in all layers of colon tissue, including lumen mucosa, lamina propria, submucosa, tunica muscularis, via intra-cecal delivery. The distribution of DATK32 was found in all segments of the colon, however, higher levels were detected in the proximal region. A significantly higher mean concentration of DATK32 was found in gastrointestinal contents and colon tissues when delivered via intra-cecal administration (DATK32: 25 mg/kg and 5 mg/kg, QD) as compared to intraperitoneal administration (DATK32: 25 mg/kg, Q3D). The blood level of DATK32 was significantly higher when delivered via intraperitoneal administration (Q3D) as compared to intra-cecal administration (Q3D & QD). The pharmacokinetics of DATK32 (25 mg/kg, QD) showed significantly higher mean concentrations of DATK32 when delivered via intra-cecal administration at 1, 2, and 4 h post-dose in the gastrointestinal contents, and 1, 2, 4 and 24 h in colon tissue as compared with the mean concentrations of DATK32 following intraperitoneal administration. The mean number of gut-homing T cells (Th memory cells) was significantly higher in the blood of groups treated with DATK32 via intra-cecal administration (QD 25 mg/kg and QD 5 mg/kg) as compared to the groups treated with DATK32 via intraperitoneal administration (Q3D 25 mg/kg). The mean number of Th memory cells was significantly lower in the Peyer's Patches of groups treated with DATK32 via intra-cecal administration (QD 25 mg/kg and 5 mg/kg) as compared to the groups treated with DATK32 via intraperitoneal administration (Q3D 25 mg/kg). The mean number of Th memory cells in mesenteric lymph nodes (MLN) was significantly lower in groups treated with DATK32 via intra-cecal administration (QD and Q3D 25 mg/kg and QD 5 mg/kg) as compared to the groups treated with DATK32 via intraperitoneal administration (Q3D 25 mg/kg).

[1817] In sum, these data show that the compositions and devices provided herein can suppress the local immune response in the intestine, while having less of a suppressive effect on the systemic immune response of an animal. These data also show that the release of DATK-32 antibody in the colon can result in a suppression of leukocyte recruitment and may provide for the treatment of colitis and other pro-inflammatory diseases of the intestine.

### Example 5. An Assessment of DATK32 Bio-Distribution Following Intracecal Administration in Male C57Bl/6 Mice

[1818] The objective of this study is to assess DATK32 bio-distribution when dosed intracecally in male C57Bl/6 mice. A minimum of 10 days prior to the start of the experiment a cohort of animals will undergo surgical implantation of a cecal cannula. A sufficient number of animals will undergo implantation to allow for 24 cannulated animals to be enrolled in the main study (e.g., 31 animals). Animals were dosed with vehicle or test article via intracecal injection (IC) on Day 0 as indicated in Table 3. Animals from all groups were sacrificed for terminal sample collection three hours following test article administration.

### Materials and Methods

### Mice

[1819] Normal male C57Bl/6 mice between the ages of 6-8 weeks old, weighing 20-24 g, were obtained from Charles River Laboratories. The mice were randomized into two groups of twelve animals, and housed in groups of 12 per cage, and acclimatized for at least three days prior to entering the study. Animal rooms were set to maintain a minimum of 12 to 15 air changes per hour, with an automatic timer for a light/dark cycle of 12 hours on/off, and fed with Labdiet 5053 sterile rodent chow, with water administered ad libitum.

### Cecal Cannulation

[1820] The animals were placed under isoflurane anesthesia, with the cecum exposed via a midline incision in the abdomen. A small point incision was made in the distal cecum where 1-2 cm of the cannula was inserted. The incision was closed with a purse string suture using 5-0 silk. An incision was then made in the left abdominal wall through which the distal end of the cannula was inserted and pushed subcutaneously to the dorsal aspect of the back. The site was then washed copiously with warmed saline prior to closing the abdominal wall. A small incision was also made in the skin of the back between the shoulder blades, exposing the tip of the cannula. The cannula was secured in place using suture, wound clips, and tissue glue. All animals received 1 mL of warm sterile saline (subcutaneous injection) and were monitored closely until recovery before returning to their cage. All animals received 0.6 mg/kg BID buprenorphine for the first 3 days, and Baytril® at 10 mg/Kg every day for the first 5 days post-surgery.

[1821] Dosing

[1822] Animals were dosed IC at a volume of 0.075 mL/animal on Days 0 as indicated in Table 3.

### Sacrifice

[1823] All animals were euthanized by CO₂ inhalation three hours after dosing on Day 0.

### Sample Collection

[1824] Terminal blood was collected and prepared for plasma using K₂EDTA as the anti-coagulant. The plasma will be split into two cryotubes, with 50 μL in one tube (PK analysis) and the remainder in another (other). Both samples were flash-frozen in liquid nitrogen. Plasma was stored at −80° C. for downstream analysis. Mesenteric lymph nodes (mLN) were collected, weighed, and flash-frozen in liquid nitrogen. Mesenteric lymph nodes were stored at −80° C. for downstream analysis. The small intestine was excised and rinsed, and the most distal 1 cm of ilium was dissected, weighed, and flash-frozen in liquid nitrogen. The samples were stored at −80° C. for downstream analysis. The cecum and colon were removed from each animal and contents collected, weighed, and snap frozen in separate cryovials. The samples were stored at −80° C. for downstream analysis. The colon was rinsed, and the most proximal 1 cm of colon was weighed and flash-frozen in liquid nitrogen. The snap frozen tissues were stored at −80° C.

TABLE 3
Study Design

| | | | | | Terminal |
|---|---|---|---|---|---|
| | No | | | | Collections |
| Group | Animals | Treatment | Route | Schedule | Day 0 |
| 1 | 12 | Vehicle | IC | Day 0 ** | Blood (plasma) |
| | | (PBS) | | | Small |
| 2 | 12 | DATK32 | | | intestine mLN |
| | | (625 μg)* | | | Colon |
| | | | | | Colon Contents |
| | | | | | Cecum Contents |

*Per mouse. TA was administered in 0.075 mL/animal. DATK32 was delivered in sterile PBS.
** Animals were dosed on Day 0 and collections were performed 3 hours later.

### Results

[1825] The data in FIGS. 63A-F show no significant differences in clinical observations. No gastrointestinal-specific or adverse effects were found in the group administered DATK32 via intra-cecal administration as compared to the group administered a vehicle control. No toxicity resulting from the treatments was reported. The level of DATK32 in the group intracecally administered DATK32 was significantly higher in cecum and colon content, and colon tissue compared to the group administered a vehicle control at 3h post-dose. A small amount of DATK32 was also detected in plasma, small intestine, and mesenteric lymph node in the group intra-cecally administered DATK32.

### Example 6. Pharmacokinectics/Pharmacodynamics and Bioavailability of Adalimumab When Applied to a TNBS-damaged Mucosal Surface (Induced Colitis) in Swine

[1826] The purpose of this non-Good Laboratory Practice (GLP) study was to explore the PK/PD, and bioavailability of adalimumab when applied to a TNBS-damaged mucosal surface (induced colitis) in Yorkshire-Cross farm swine, and to determine an appropriate dose and frequency for studies where a drug will be delivered by the ingestible device system. The ingestible device system will be capable of delivering a TNF inhibitor (adalimumab) topically and locally to damaged mucosa in human patients with inflammatory bowel disease (IBD). The TNBS-induced colitis model was validated when a single administration on Day 1 of 40 mL of 100% ethanol (EtOH) mixed with 5 grams of TNBS diluted in 10 mL of water via an enema using a rubber catheter resulted in the intended reproducible induction of damaged mucosal surface (induced colitis) in Yorkshire-Cross farm swine.

[1827] This study investigated whether topical delivery of adalimumab would result in increased local mucosal tissue levels with limited drug reaching systemic circulation, as compared to subcutaneous administration; whether local mucosal tissue levels of drug would be greater in damaged tissues when compared to normal tissues; whether increasing the dose of drug would result in increased mucosal tissue levels in local and distal TNBS-damaged tissues; and whether topical delivery of adalimumab would result in reductions in inflammatory cytokines such as TNF-α in damaged tissues, feces, and possibly blood.

[1828] All animals were subjected to intra-rectal administration of trinitrobenzene sulfonic acid (TNBS) to induce chronic colitis on day −2. All animals were fasted prior to colitis induction. Bedding was removed and replaced with rubber mats on day −3 to prevent ingestion of straw bedding material. The dose was 40 mL of 100% EtOH mixed with 5 grams of TNBS diluted in 10 mL of water, then instilled into the colon intra-rectally using a flexible gavage tube by a veterinary surgeon (deposited in a 10-cm portion of the distal colon and proximal rectum, and retained for 12 minutes by use of two Foley catheters with 60-mL balloons). Approximately 3 days after induction, macroscopic and microscopic alterations of colonic architecture were apparent: some necrosis, thickening of the colon, and substantial histologic changes were observed (FIGS. 49 and 50). The study employed 15 female swine (approximately 35 to 45 kg at study start) allocated to one of five groups. Group 1 employed three animals that were the treated controls. Each animal in Group 1 was administered adalimumab by subcutaneous injection at 40 mg in 0.8 mL saline. Groups 2, 3, 4, and 5 employed 3 animals in each group. Animals in these groups were administered intra-rectal adalimumab at 40 mg in 0.8 mL saline. The test drug (adalimumab) was administered to all groups on study day 1. The intra-rectal administrations (Groups 2-5) were applied to damaged mucosal surface of the bowel vial intra-rectal administration by a veterinary surgeon. Blood (EDTA) was collected from all animals (cephalic, jugular, or catheter) on day −3 (n=15), −1 (n=15), and 6 (n=15), 12 (n=12), 24 (n=9), and 48 (n=6) hours post-dose (87 bleeds total). The EDTA samples were split into two aliquots, and one was centrifuged for PK plasma, and stored frozen (−80° C.) for PK analyses and reporting. Fecal samples were collected for the same time-points (87 fecal collections). Fecal samples were flash-frozen in liquid nitrogen and then stored at −80° C. for analysis of drug levels and inflammatory cytokines. Groups 2, 3, 4, and 5 were euthanized and subjected to gross necropsy and tissue collection 6, 12, 24, and 48 hours post-dose, respectively. Group 1 was similarly euthanized and necropsied 48 hours post-dose. The animals were euthanized via injection of a veterinarian-approved euthanasia solution as per the schedule. Immediately after euthanasia in order to avoid autolytic changes, colon tissues were collected, opened, rinsed with saline, and a detailed macroscopic examination of the colon were performed to identify macroscopic findings related to TNBS-damage. Tissue samples were taken from the proximal, mid, and distal transverse colon; the dose site; and the distal colon. Each tissue sample was divided into two approximate halves; one tissue section was placed into 10% neutral buffered formalin (NBF) and evaluated by a Board certified veterinary pathologist, and the remaining tissue section was flash frozen in liquid nitrogen and stored frozen at −80° C. Clinical signs (ill health, behavioral changes, etc.) were recorded daily beginning on day −3. Additional pen-side observations were conducted once or twice daily. Animals observed to be in ill health were examined by a veterinarian. Body weight was measured for all animals on day −3, and prior to scheduled euthanasia. Table 4.1, depicted below, shows the study design.

### Materials and Methods

### Test Article

[1829] Adalimumab (EXEMPTIA™) is a Tumour Necrosis Factor (TNF) inhibitor. A single dose was pre-filled in a syringe (40 mg in a volume of 0.8 mL).

TABLE 4.1
Study Design Table

| | Sample | | | Days | | | | Hours | | | | | | | | |
|---|---|---|---|---|---|---|---|---|---|---|---|---|---|---|---|---|
| General | size | Dose | Route | −3 | −2 | −1 | 1 | 0.5 | 1 | 2 | 4 | 6 | 8 | 12 | 24 | 48 |
| Fast | | | | • | | | | | | | | | | | | |
| Food/Water | | ad libidum | oral | | • | • | • | • | • | • | • | • | • | • | • | • |
| Observations | | | | | | | | | | | | | | | | |
| clinical observations | | | | • | • | • | • | | | | | | | | • | • |
| body weight | | | | • | | | • | | | | | | | | • | • |
| Treatments (groups) | | | | | | | | | | | | | | | | |
| TNBS | | | intra | | • | | | | | | | | | | | |
| (all animals) | | | rectal | | | | | | | | | | | | | |
| 1. Treated control | n = 3 | 40 mg in | sub- | | | | • | | | | | | | | | |
| | | 0.8 mL | cutaneous | | | | | | | | | | | | | |
| | | saline | | | | | | | | | | | | | | |
| euthanized | | | | | | | | | | | | | | | | n = 3 |
| 2. Adalimumab | n = 3 | 40 mg in | intra | | | | | | | | | | | | | |
| | | 0.8 mL | rectal | | | | | | | | | | | | | |
| | | saline | | | | | | | | | | | | | | |
| euthanized | | | | | | | | | | | | n = 3 | | | | |
| 3. Adalimumab | n = 3 | 40 mg in | intra | | | | • | | | | | | | | | |
| | | 0.8 mL | rectal | | | | | | | | | | | | | |
| | | saline | | | | | | | | | | | | | | |
| euthanized | | | | | | | | | | | | | | n = 3 | | |
| 4. Adalimumab | n = 3 | 40 mg in | intra | | | | • | | | | | | | | | |
| | | 0.8 mL | rectal | | | | | | | | | | | | | |
| | | saline | | | | | | | | | | | | | | |
| euthanized | | | | | | | | | | | | | | | n = 3 | |
| 5. Adalimumab | n = 3 | 40 mg in | intra | | | | • | | | | | | | | | |
| | | 0.8 mL | rectal | | | | | | | | | | | | | |
| | | saline | | | | | | | | | | | | | | |
| euthanized | | | | | | | | | | | | | | | | n = 3 |
| Adalimumab (required) | | 600 | | | | | | | | | | | | | | |
| Samples | | | | | | | | | | | | | | | | |
| PBMCs | | | cephalic, | | | | • | | | | | • | | • | • | • |
| | | | jugular or | | | | | | | | | | | | | |
| | | | catheter | | | | | | | | | | | | | |
| Serum | | | cephalic, | • | | • | • | | | | | • | | • | • | • |
| | | | jugular or | | | | | | | | | | | | | |
| | | | catheter | | | | | | | | | | | | | |
| Fecal | | | rectal | • | | • | • | | | | | • | | • | • | • |
| Tissue | | | necropsy | | | | | | | | | • | | • | • | • |
| Analysis | | | | | | | | | | | | | | | | |
| Histopathology | 1 location | 4 locations | | | | | | | | | | | | | | |
| inflammed | 45 | 180 | H&E | | | | | | | | | | | | | |
| normal | 45 | 180 | H&E | | | | | | | | | | | | | |
| Blood | | | | | | | | | | | | | | | | |
| adalimumab | 57 | | pbl | | | | 15 | | | | | 15 | | 12 | 9 | 6 |
| TNFα | 87 | | pbl | 15 | | 15 | 15 | | | | | 15 | | 12 | 9 | 6 |
| Feces | | | | | | | | | | | | | | | | |
| adalimumab | 57 | | pbl | | | | 15 | | | | | 15 | | 12 | 9 | 6 |
| TNFα | 87 | | pbl | 15 | | 15 | 15 | | | | | 15 | | 12 | 9 | 6 |
| Tissue | | | | | | | | | | | | | | | | |
| Inflammed | | | | | | | | | | | | | | | | |
| adalimumab | 45 | 180 | pbl | | | | | | | | | 3 | | 3 | 3 | 6 |
| TNFα | 45 | 180 | pbl | | | | | | | | | 3 | | 3 | 3 | 6 |
| HER2 | 45 | 180 | pbl | | | | | | | | | 3 | | 3 | 3 | 6 |
| Normal | | | | | | | | | | | | | | | | |
| adalimumab | 45 | 180 | pbl | | | | | | | | | 3 | | 3 | 3 | 6 |
| TNFα | 45 | 180 | pbl | | | | | | | | | 3 | | 3 | 3 | 6 |
| HER2 | 45 | 180 | pbl | | | | | | | | | 3 | | 3 | 3 | 6 |

### Results

[1830] While subcutaneously administered adalimumab was detected at all times points tested in plasma, topically administered adalimumab was barely detectable in plasma (FIGS. 51 and 52). Both topical delivery and subcutaneous delivery of adalimumab resulted in reduced levels of TNF-α in colon tissue of TNBS-induced colitis animals, yet topical delivery of adalimumab was able to achieve a greater reduction in TNF-α levels (FIGS. 53 and 54).

[1831] Either subcutaneous or intra-rectal administration of adalimumab was well tolerated and did not result in death, morbidity, adverse clinical observations, or body weight changes. A decreased level of total TNBS-related inflammatory response was observed by adalimumab treatment via intra-rectal administration when applied to the damaged mucosal surface of the bowel when compared to subcutaneous delivery. A significantly higher concentration of adalimumab was measured in blood following subcutaneous delivery as compared to the blood concentration following intra-rectal administration. Intra-rectal administration of adalimumab decreased the total and normalized TNFα concentration over time (6-48h) and was more effective at reducing TNFα at the endpoint (48h) as compared to groups administered adalimumab subcutaneously.

[1832] In sum, these data show that the compositions and devices provided herein can suppress the local immune response in the intestine, while having less of a suppressive effect on the systemic immune response of an animal. For example, these data show that intracecal administration of adalimumab using a device as described herein can provide for local delivery of adalimumab to the site of disease, without suppressing the systemic immune response. These data also show that local administration of adalimumab using a device as described herein can result in a significant reduction of the levels of TNFα in diseases animals.

### Example 7. Comparison of Systemic Versus Intracecal Delivery of Cyclosporine A

[1833] The objective of this study was to compare the efficacy of an immunosuppressant agent (cyclosporine A; CsA) when dosed systemically versus intracecally to treat dextran sulfate sodium salt (DSS)-induced colitis in male C57Bl/6 mice.

### Experimental Design

[1834] A minimum of 10 days prior to the start of the experiment a cohort of animals underwent surgical implantation of a cecal cannula. A sufficient number of animals underwent implantation to allow for 44 cannulated animals to be enrolled in the main study (e.g., 76 animals). Colitis was induced in 60 male C5Bl/6 mice by exposure to 3% DSS-treated drinking water from day 0 to day 5. Two groups of eight additional animals (cannulated and non-cannulated) served as no-disease controls (Groups 1 and 2). Animals were dosed with cyclosporine A via intraperitoneal injection (IP), oral gavage (PO), or intracecal injection (IC) from day 0 to 14 as indicated in Table 5.1. All animals were weighed daily and assessed visually for the presence of diarrhea and/or bloody stool at the time of dosing. Mice underwent video endoscopy on days 10 and 14 to assess colitis severity. Images were captured from each animal at the most severe region of disease identified during endoscopy. Additionally, stool consistency was scored during endoscopy using the parameters defined in Table 5.2. Following endoscopy on day 14, animals from all groups were sacrificed and underwent terminal sample collection.

[1835] Specifically, animals in all treatment groups dosed on day 14 were sacrificed at a pre-dosing time point, or 1, 2, and 4 hours after dosing (n=3/group/time point). Terminal blood was collected via cardiac puncture and prepared for plasma using K₂EDTA as the anti-coagulant. The blood cell pellet was retained and snap frozen while the resulting plasma was split into two separate cryotubes, with 100 μL in one tube and the remainder in the second. Additionally, the cecum and colon were removed from all animals; the contents were collected, weighed, and snap frozen in separate cyrovials. The colon was then rinsed, measured, weighed, and then trimmed to 6 cm in length and divided into five pieces. The most proximal 1 cm of colon was snap frozen for subsequent bioanalysis of cyclosporine A levels. Of the remaining 5 cm of colon, the most distal and proximal 1.5-cm sections were each placed in formalin for 24 hours, then transferred to 70% ethanol for subsequent histological evaluation. The middle 2-cm portion was bisected longitudinally and placed into two separate cryotubes, weighed, and snap frozen in liquid nitrogen. All plasma and frozen colon tissue were stored at −80° C. for selected end point analysis. For all control animals in Groups 1-4, there was an additional collection of 100 μL of whole blood from all animals which was then processed for FACS analysis of α4 and β7 expression on TH memory cells. The details of the study are shown in Table 5.1.

TABLE 5.1
Study Design

| Group | 1 | 2 | 3 | 4 | 13 | 14 | 15 |
|---|---|---|---|---|---|---|---|
| Number | | | | | | | |
| Number of | 8 | 8 | 12 | 12 | 12 | 12 | 12 |
| Animals | | | | | | | |
| Cecal | NO | YES | NO | YES | NO | YES | YES |
| Cannula | | | | | | | |
| DSS | N/A | N/A | 3% DSS on Day 0 to Day 5 | | | | |
| Treatment | none | none | vehicle | vehicle | CsA | CsA | CsA |
| Dose | N/A | N/A | N/A | N/A | 10 | 10 | 3 |
| (mg/kg) | | | | | | | |
| Route | N/A | N/A | N/A | N/A | PO | IC | IC |
| Dosing | N/A | N/A | QD: Day | QD: Day | QD: Day | QD: Day | QD: Day |
| Schedule | | | 0 to 14 | 0 to 14 | 0 to 14 | 0 to 14 | 0 to 14 |

| | |
|---|---|
| Endoscopy | |
| Schedule* | Days 10 and 14 |
| Endpoints | Endoscopy, Colon weight/length, stool score |
| Day 14 | Terminal Collection (all groups): Cecal contents, colon contents, plasma, and colon tissue |
| | FACS analysis collection of Groups 1-4: |
| | Whole blood for the following FACS panel: CD4, CD44, CD45RB, α4, β7, CD16/32 |
| PK | N = 3/ time points |
| Sacrifice | At pre-dose and 1, 2, and 4 hours post-dosing |
| (Day 14) | |

*Animals were dosed once (QD) on Day 14 and plasma collected (K2EDTA) at pre-dosing, 1, 2, and 4 hours post-dosing from n = 3/group/time point. Each collection was terminal.

### Experimental Procedures

### Cecal Cannulation

[1836] Animals were placed under isoflurance anesthesia, and the cecum exposed via a mid-line incision in the abdomen. A small point incision was made in the distal cecum through which 1-2 cm of the cannula was inserted. The incision was closed with a purse-string suture using 5-0 silk. An incision was made in the left abdominal wall through which the distal end of the cannula was inserted and pushed subcutaneously to the dorsal aspect of the back. The site was washed copiously with warmed saline prior to closing the abdominal wall. A small incision was made in the skin of the back between the shoulder blades, exposing the tip of the cannula. The cannula was secured in place using suture, wound clips, and tissue glue. All animals received 1 mL of warm sterile saline (subcutaneous injection) and were monitored closely until fully recovered before returning to the cage. All animals received buprenorphine at 0.6 mg/kg BID for the first 3 days, and Baytril® at 10 mg/kg QD for the first 5 days following surgery.

### Disease Induction

[1837] Colitis was induced on day 0 via addition of 3% DSS (MP Biomedicals, Cat #0260110) to the drinking water. Fresh DSS/water solutions were made on day 3 and any of the remaining original DSS solution was discarded.

### Dosing

[1838] Animals were dosed by oral gavage (PO), intraperitoneal injection (P), or intracecal injection (IC) at a volume of 0.1 mL/20 g on days 0 to 14 as indicated in Table 5.1.

### Body Weight and Survival

[1839] Animals were observed daily (weight, morbidity, survival, presence of diarrhea, and/or bloody stool) in order to assess possible differences among treatment groups and/or possible toxicity resulting from the treatments.

### Animals Found Dead or Moribund

[1840] Animals were monitored on a daily basis and those exhibiting weight loss greater than 30% were euthanized, and samples were not collected from these animals.

### Endoscopy

[1841] Each mouse underwent video endoscopy on days 10 and 14 using a small animal endoscope (Karl Storz Endoskope, Germany) under isoflurane anesthesia. During each endoscopic procedure still images as well as video were recorded to evaluate the extent of colitis and the response to treatment. Additionally, we attempted to capture an image from each animal at the most severe region of disease identified during endoscopy. Colitis severity was scored using a 0-4 scale (0=normal; 1=loss of vascularity; =loss of vascularity and friability; 3=friability and erosions; 4=ulcerations and bleeding). Additionally, stool consistency was scored during endoscopy using the parameters defined in Table 5.2.

TABLE 5.2
Stool Consistency

| Score | Description |
|---|---|
| 0 | Normal, well-formed pellet |
| 1 | Loose stool, soft, staying in shape |
| 2 | Loose stool, abnormal form with excess moisture |
| 3 | Watery or diarrhea |
| 4 | Bloody diarrhea |

### Tissue/Blood for FACS

[1842] Tissue and blood were immediately placed in FACS buffer (lx phosphate-buffered saline (PBS) containing 2.5% fetal calf serum (FCS)) and analyzed using the antibody panel in Table 5.3.

TABLE 5.3
FACS Antibody Panel

| Antibody Target | Fluorochrome | Purpose |
|---|---|---|
| CD4 | APC-Vio770 | Defines T_{H} cells |
| CD44 | VioBlue | Memory/Naïve |
| | | discrimination |
| CD45RB | FITC | Memory/Naïve |
| | | discrimination |
| α4 | APC | Defines T_{H}-memory subset |
| | | of interest |
| β7 | PE | Defines T_{H}-memory subset |
| | | of interest |
| CD16/32 | — | Fc block |

### Results

[1843] The data in FIG. 55 show a decrease in weight loss is observed in DSS mice intracecally administered cyclosporine A as compared to DSS mice orally administered cyclosporine A. The data in FIG. 56 show a decrease in plasma concentration of cyclosporine A in DSS mice intracecally administered cyclosporine A as compared to DSS mice orally administered cyclosporine A. The data in FIGS. 57-59 show an increased concentration of cyclosporine A in the colon tissue of DSS mice intracecally administered cyclosporine A as compared to the concentration of cyclosporine A in the colon tissue of DSS mice orally administered cyclosporine A.

[1844] The data in FIG. 60 show that DSS mice intracecally administered cyclosporine A have an increased concentration of IL-2 in colon tissue as compared to DSS mice orally administered cyclosporine A. The data in FIG. 61 show that DSS mice intracecally administered cyclosporine A have a decreased concentration of IL-6 in colon tissue as compared to DSS mice orally administered cyclosporine A.

[1845] In sum, these data show that the compositions and devices provided herein can suppress the local immune response in the intestine, while having less of a suppressive effect on the systemic immune response of an animal. For example, these data demonstrate that the present compositions and devices can be used to release cyclosporine A to the intestine and that this results in a selective immune suppression in the colon, while having less of an effect on the immune system outside of the intesting. These data also suggest that the present compositions and devices will provide for the treatment of colitis and other pro-inflammatory disorders of the intestine.

### Example 8. Bellows Testing: Drug Stability Bench Test

[1846] Experiments were run to evaluate the effects that bellows material would have on the function of a drug used as the dispensable substance. The experiments also evaluated the effects on drug function due to shelf life in the bellows.

[1847] The adalimumab was loaded into simulated device jigs containing either tapered silicone bellows or smooth PVC bellows and allowed to incubate for 4, 24, or 336 hours at room temperature while protected from light. FIG. 64 illustrates the tapered silicone bellows, and FIG. 65 illustrates the tapered silicone bellows in the simulated device jig. FIG. 66 illustrates the smooth PVC bellows, and FIG. 67 illustrates the smooth PVC in the simulated device jig.

[1848] The drug was subsequently extracted using the respective dispensing systems and tested by a competitive inhibition assay. The test method has been developed from the literature (Velayudhan et al., “Demonstration of functional similarity of proposed biosimilar ABP501 to adalimumab” BioDrugs 30:339-351 (2016) and Barbeauet et al., “Application Note: Screening for inhibitors of TNFα/s TNFR1 Binding using AlphaScreen™ Technology”. PerkinElmer Technical Note ASC-016. (2002)), as well as pre-testing development work using control drug and experiments using the provided AlphaLISA test kits. FIG. 68 demonstrates the principle of the competition assay performed in the experiment.

[1849] The bellows were loaded as follows: aseptically wiped the dispensing port of the simulated ingestible device jig with 70% ethanol; allowed to air dry for one minute; used an adalimumab delivery syringe to load each set of bellows with 200 μL of drug; took a photo of the loaded device; gently rotated the device such that the drug is allowed to come in contact with all bellows surfaces; protected the bellows from light; and incubate at room temperature for the predetermined time period to allow full contact of the drug with all bellows' surfaces.

[1850] The drug was extracted as follows: after completion of the incubation period; the device jig was inverted such that the dispensing port was positioned over a sterile collection microfuge tube and petri dish below; five cubic centimeters of air was drawn into an appropriate syringe; the lure lock was attached to the device jig; the syringe was used to gently apply positive pressure to the bellow with air such that the drug was recovered in the collection microfuge tube; where possible, a video of drug dispensing was taken; samples were collected from each bellows type; a control drug sample was collected by directly dispensing 200 μL of drug from the commercial dispensing syringe into a sterile microfuge tube; the control drug-free sample was collected by directly dispensing 200 μL of PBS using a sterile pipette into a sterile microfuge tube; the collected drug was protected from light; and the drug was diluted over the following dilution range (250, 125, 25, 2.5, 0.25, 0.025, 0.0125, 0.0025 μg) in sterile PBS to determine the IC₅₀ range of the drug.

[1851] To determine any effects storage conditions may have on drug efficacy in the device, the drug (stored either in the syringe, silicon bellows, PVC bellows) was stored at room temperature while protected from light for 24 hours and 72 hours. Samples were then extracted and the steps in the preceding paragraph were repeated.

[1852] The AlphaLISA (LOCI™) test method was used. Human TNFα standard dilution ranges were prepared as described in Table 6.

TABLE 6

| | | | [human TNFα] | |
|---|---|---|---|---|
| | | Vol. of | in standard curve | |
| | Vol. of | diluent | (g/mL | (pg/mL |
| Tube | human TNFα (μL) | (μL) * | in 5 μL) | in 5 μL) |
| A | 10 μL of reconstituted | 90 | 1E−07 | 100 000 |
| | human TNFα | | | |
| B | 60 μL of tube A | 140 | 3E−08 | 30 000 |
| C | 60 μL of tube B | 120 | 1E−08 | 10 000 |
| D | 60 μL of tube C | 140 | 3E−09 | 3 000 |
| E | 60 μL of tube D | 120 | 1E−09 | 1 000 |
| F | 60 μL of tube E | 140 | 3E−10 | 300 |
| G | 60 μL of tube F | 120 | 1E−10 | 100 |
| H | 60 μL of tube G | 140 | 3E−11 | 30 |
| I | 60 μL of tube H | 120 | 1E−11 | 10 |
| J | 60 μL of tube I | 140 | 3E−12 | 3 |
| K | 60 μL of tube J | 120 | 1E−12 | 1 |
| L | 60 μL of tube K | 140 | 3E−13 | 0.3 |
| M ** | 0 | 100 | 0 | 0 |
| (background) | | | | |
| N ** | 0 | 100 | 0 | 0 |
| (background) | | | | |
| O ** | 0 | 100 | 0 | 0 |
| (background) | | | | |
| P ** | 0 | 100 | 0 | 0 |
| (background) | | | | |

[1853] The test was performed as follows: the above standard dilution ranges were in a separate 96-well plate; to ensure consistent mixing, samples were mixed up and down gently with a pipette five times; a 384-well test plate was prepared according to the test layout diagram depicted Table 7; five microliters of 10,000 pg/mL TNFα standard from the previously made dilution plate was added to each corresponding concentration as shown in Table 6; five microliters of recovered drug (directly from the commercial syringe (A), from the silicone bellows (B Si), from the PVC bellows (B PVC), or from the PBS control (C) was added into the corresponding wells described in Table 5; the test plate was incubated for one hour at room temperature while protected from light; 10 microliters of acceptor beads were added to each previously accessed well; the wells were incubated for 30 minutes at room temperature while protected from light; 10 μL of biotinylated antibody was added to each previously accessed well; the wells were incubated for 15 minutes at room temperature, while protected from light; the room lights were darkened and 25 microliters of streptavidin (SA) donor beads were added to each previously accessed well; the wells were incubated for 30 minutes at room temperature while protected from light; the plate was read in Alpha Mode; and the results were recorded. Upon addition of reagent(s) in the various steps, each well was pipetted up and down three times to achieve good mixing.

TABLE 7

| | 1 | 2 | 3 | 4 | 5 | 6 | 7 | 8 | 9 | 10 | 11 | 12 |
|---|---|---|---|---|---|---|---|---|---|---|---|---|
| | STD2 | | STD10 | 250 | 250 | 250 | 250 | 250 | 250 | 250 | 250 | 250 |
| A | 1.00E+05 | | 10 | A | A | A | A | A | B Si | B Si | B Si | B Si |
| B | | | | | | | | | | | | |
| C | STD3 | | STD11 | 125 | 125 | 125 | 125 | 125 | 125 | 125 | 125 | 125 |
| | 30000 | | 3 | A | A | A | A | A | B Si | B Si | B Si | B Si |
| D | | | | | | | | | | | | |
| | STD4 | | STD12 | 25 | 25 | 25 | 25 | 25 | 25 | 25 | 25 | 25 |
| E | 10000 | | 1 | A | A | A | A | A | B Si | B Si | B Si | B Si |
| F | | | | | | | | | | | | |
| | STD5 | | STD13 | 2.5 | 2.5 | 2.5 | 2.5 | 2.5 | 2.5 | 2.5 | 2.5 | 2.5 |
| G | 3000 | | 0.333 | A | A | A | A | A | B Si | B Si | B Si | B Si |
| H | | | | | | | | | | | | |
| | STD6 | | Blank | 0.25 | 0.25 | 0.25 | 0.25 | 0.25 | 0.25 | 0.25 | 0.25 | 0.25 |
| I | 1000 | | 0 | A | A | A | A | AB | Si | B Si | B Si | B Si |
| J | | | | | | | | | | | | |
| | STD7 | | Blank | 0.025 | 0.025 | 0.025 | 0.025 | 0.025 | 0.025 | 0.025 | 0.025 | 0.025 |
| K | 300 | | 0 | A | A | A | A | A | B Si | B Si | B Si | B Si |
| L | | | | | | | | | | | | |
| M | STD8 | | Blank | 0.013 | 0.013 | 0.013 | 0.013 | 0.013 | 0.013 | 0.013 | 0.013 | 0.013 |
| | 100 | | 0 | A | A | A | A | A | B Si | B Si | B Si | B Si |
| N | | | | | | | | | | | | |
| O | STD9 | | Blank | 0.003 | 0.003 | 0.003 | 0.003 | 0.003 | 0.003 | 0.003 | 0.003 | 0.003 |
| | 30 | | 0 | A | A | A | A | A | B Si | B Si | B Si | B Si |
| P | | | | | | | | | | | | |
| | | 13 | 14 | 15 | 16 | 17 | 18 | 19 | 20 | 21 | 22 | 23 |
| | | 250 | 250 | 250 | 250 | 250 | 250 | 250 | 250 | 250 | 250 | 250 |
| | A | B Si | B PVC | B PVC | B PVC | B PVC | B PVC | C | C | C | C | C |
| | B | | | | | | | | | | | |
| | C | 125 | 125 | 125 | 125 | 125 | 125 | 125 | 125 | 125 | 125 | 125 |
| | | B Si | B PVC | B PVC | B PVC | B PVC | B PVC | C | C | C | C | C |
| | D | | | | | | | | | | | |
| | | 25 | 25 | 25 | 25 | 25 | 25 | 25 | 25 | 25 | 25 | 25 |
| | E | B Si | B PVC | B PVC | B PVC | B PVC | B PVC | C | C | C | C | C |
| | F | | | | | | | | | | | |
| | | 2.5 | 2.5 | 2.5 | 2.5 | 2.5 | 2.5 | 2.5 | 2.5 | 2.5 | 2.5 | 2.5 |
| | G | B Si | B PVC | B PVC | B PVC | B PVC | B PVC | C | C | C | C | C |
| | H | | | | | | | | | | | |
| | | 0.25 | 0.25 | 0.25 | 0.25 | 0.25 | 0.25 | 0.25 | 0.25 | 0.25 | 0.25 | 0.25 |
| | I | B Si | B PVC | B PVC | B PVC | B PVC | B PVC | C | C | C | C | C |
| | J | | | | | | | | | | | |
| | | 0.025 | 0.025 | 0.025 | 0.025 | 0.025 | 0.025 | 0.025 | 0.025 | 0.025 | 0.025 | 0.025 |
| | K | B Si | B PVC | B PVC | B PVC | B PVC | B PVC | C | C | C | C | C |
| | L | | | | | | | | | | | |
| | M | 0.013 | 0.013 | 0.013 | 0.013 | 0.013 | 0.013 | 0.013 | 0.013 | 0.013 | 0.013 | 0.013 |
| | | B Si | B PVC | B PVC | B PVC | B PVC | B PVC | C | C | C | C | C |
| | N | | | | | | | | | | | |
| | O | 0.003 | 0.003 | 0.003 | 0.003 | 0.003 | 0.003 | 0.003 | 0.003 | 0.003 | 0.003 | 0.003 |
| | | B Si | B PVC | B PVC | B PVC | B PVC | B PVC | C | C | C | C | C |
| | P | | | | | | | | | | | |

[1854] The data are shown in FIGS. 69-71. The data demonstrate that the bellows do not negatively impact the drug function after shelf lives of 4 hours, 24 hours, or 336 hours. The IC₅₀ values of the drug dispensed from the bellows were comparable to the IC₅₀ values of the standard dispensation method (Table 6). A slight right shift was noted in the bellows curves after 24 hours (FIG. 70), but this shift was well within the error bars of the curves. Tables 8-11 represent data of FIGS. 69-71, respectively. Of note, when comparing mean (n=5) RFU data between test articles over the concentration ranges significant differences (p<0.05) were discerned. However, these significant differences did not favor either test article over time, suggesting that they were not related to the performance of the material in response to the drug (FIGS. 69-71).

TABLE 8

| | Needle | Silicone | PVC |
|---|---|---|---|
| | control (A) | Bellows (B) | Bellows (C) |
| 4 Hours | 0.0174 | 0.0169 | 0.0172 |
| 24 Hours | 0.0180 | 0.0180 | 0.0180 |
| 336 Hours | 0.0144 | 0.0159 | 0.0163 |

TABLE 9
Statistics (Student's T-test, 2 tailed, non-
pair-wise, for significance p < 0.05)

| Drug | Needle control (A) | Needle control (A) | Silicone |
|---|---|---|---|
| (micrograms) | vs. Silicone (B) | vs. PVC | vs. PVC |
| 0.0001 | 0.911 | 0.008* | 0.268 |
| 0.0025 | 0.138 | 0.390 | 0.822 |
| 0.0125 | 0.122 | 0.118 | 0.771 |
| 0.025 | 0.143 | 0.465 | 0.020* |
| 0.25 | 0.591 | 0.984 | 0.350 |
| 2.5 | 0.243 | 0.124 | 0.169 |
| 125 | 0.867 | 0.688 | 0.182 |
| 250 | 0.681 | 0.184 | 0.108 |

*p < 0.5 data set

TABLE 10
Statistics (Student's T-test, 2 tailed, non-
pair-wise, for significance p < 0.05)

| Drug | Needle control (A) | Needle control (A) | Silicone |
|---|---|---|---|
| (micrograms) | vs. Silicone (B) | vs. PVC | vs. PVC |
| 0.0001 | 0.132 | 0.038* | 0.292 |
| 0.0025 | 0.003* | 0.076 | 0.575 |
| 0.0125 | 0.161 | 0.022* | 0.783 |
| 0.025 | 0.058 | 0.078 | 0.538 |
| 0.25 | 0.974 | 0.384 | 0.198 |
| 2.5 | 0.714 | 0.080 | 0.017* |
| 125 | 0.873 | 0.731 | 0.269 |
| 250 | 0.798 | 0.956 | 0.903 |

*p < 0.5 data set

TABLE 11
Statistics (Student's T-test, 2 tailed, non-
pair-wise, for significance p < 0.05)

| Drug | Needle control (A) | Needle control (A) | Silicone |
|---|---|---|---|
| (micrograms) | vs. Silicone (B) | vs. PVC | vs. PVC |
| 0.0001 | 0.858449 | 0.036847* | 0.026444* |
| 0.0025 | 0.087379 | 0.280302 | 0.046767* |
| 0.0125 | 0.469282 | 0.057232 | 0.117194 |
| 0.025 | 0.02758* | 0.078234 | 0.373419 |
| 0.25 | 0.411548 | 0.258928 | 0.400498 |
| 2.5 | 0.368959 | 0.156574 | 0.006719* |
| 125 | 0.948649 | 0.246702 | 0.463735 |
| 250 | 0.485046 | 0.128993 | 0.705543 |

*p < 0.5 data set

### Example 9. A Comparison Study of Systemic Vs Intracecal Delivery of SMAD7 Bio-Distribution in DSS-Induced Colitis in Male C57Bl/6 Mice

[1855] The objective of this study was to compare the efficacy of novel test articles, e.g., fluorescent SMAD7 antisense oligonucleotides (SMAD7 AS), when dosed systemically versus intracecally in the treatment of DSS-induced colitis, in male C57Bl/6 mice.

### Experimental Design

[1856] A minimum of 10 days prior to the start of the experiment a cohort of animals underwent surgical implantation of a cecal cannula. A sufficient number of animals underwent implantation to allow for 12 cannulated animals to be enrolled in the main study (i.e., 16 animals).

[1857] Colitis was induced in 12 male C57Bl/6 mice (Groups 4-5) by exposure to 3% DSS-treated drinking water from Day 0 to Day 5. Three groups of six additional animals per group (n=6 cannulated; n=12 non-cannulated; Groups 1-3) served as no-disease controls (Groups 1-3). All animals were weighed daily and assessed visually for the presence of diarrhea and/or bloody stool during this time.

[1858] Animals were dosed with test-article via oral gavage (PO) or intracecal injection (IC) once on Day 9 as indicated in Table 12. The animals in Group 0 were not dosed. The animals in Groups 2 and 4 were dosed PO with SMAD7 antisense. The animals in Groups 3 and 5 were dosed IC with SMAD7 antisense.

[1859] All animals were euthanized by CO₂ inhalation 12 hours after dosing, on Day 10. Terminal blood was collected into two K₂EDTA tubes and processed for plasma. Both plasma and pellet samples were snap-frozen in liquid nitrogen and stored at −80° C. Cecum contents were removed and the contents were split into two aliquots. Both aliquots were weighed and snap frozen in separate cryovials in liquid nitrogen. The cecum was excised and bisected longitudinally; each piece is separately weighed and flash-frozen in liquid nitrogen. The colon contents were removed and the contents were split into two aliquots. Both aliquots were weighed and snap frozen in separate cryovials in liquid nitrogen. The colon was then rinsed, and the most proximal 2 cm of colon was collected. This 2-cm portion was bisected longitudinally; each piece was separately weighed and flash-frozen in liquid nitrogen. Snap-frozen blood pellet, cecum/colon contents, and tissue samples were used for downstream fluoremetry or RP-HPLC. The details of the study design are shown in Table 12.

TABLE 12
Study design

| | | | | | | | Terminal |
|---|---|---|---|---|---|---|---|
| | No | Cecal | Colitis | | | | Collections |
| Group | Animals | Cannula | Induction | Treatment | Route | Schedule | Day 10 |
| 1 | 6 | NO | — | — | — | — | Whole |
| | | | | | | | blood, |
| 2 | 6 | NO | | Fluorescently | PO | QD | plasma, cecal |
| | | | | labeled | | Day 9** | contents, colon |
| | | | | SMAD7 | | | contents, cecal |
| 3 | 6 | YES | | antisense | IC | | tissue, colon |
| | | | | | | | tissue |
| 4 | 6 | NO | 3% DSS | 50 ng* | PO | | |
| | | | Days 0-5 | | | | |
| 5 | 6 | YES | | | IC | | |

*Per mouse. TA is administered in 0.075 mL/animal.
**Animals are dosed on Day 9 and collections are performed 12 hours later.

### Materials and Methods

### Mice

[1860] Normal male C57Bl/6 mice between the ages of 6-8 weeks old, weighing 20-24 g, were obtained from Charles River Laboratories. The mice were randomized into five groups of six mice each, and housed in groups of 8-15 per cage, and acclimatized for at least three days prior to entering the study. Animal rooms were set to maintain a minimum of 12 to 15 air changes per hour, with an automatic timer for a light/dark cycle of 12 hours on/off, and fed with Labdiet 5053 sterile rodent chow, with water administered ad libitum.

### Cecal Cannulation

[1861] The animals were placed under isoflurane anesthesia, with the cecum exposed via a midline incision in the abdomen. A small point incision was made in the distal cecum, where 1-2 cm of the cannula was inserted. The incision was closed with a purse string suture using 5-0 silk. An incision was then made in the left abdominal wall through which the distal end of the cannula was inserted and pushed subcutaneously to the dorsal aspect of the back. The site was then washed copiously with warmed saline prior to closing the abdominal wall. A small incision was also made in the skin of the back between the shoulder blades, exposing the tip of the cannula. The cannula was secured in place using suture, wound clips, and tissue glue. All animals were administered 1 mL of warm sterile saline (subcutaneous injection) and were monitored closely until recovery before returning to their cage. All animals were administered 0.6 mg/kg BID buprenorphine for the first 3 days, and Baytril® at 10 mg/Kg every day for the first 5 days post-surgery.

### Disease Induction

[1862] Colitis was induced on Day 0 via addition of 3% DSS (MP Biomedicals, Cat #0260110) to the drinking water. Fresh DSS/water solutions was provided on Day 3 and any of the remaining original DSS solution is discarded.

### Body Weight and Survival

[1863] Animals were observed daily (weight, morbidity, survival, presence of diarrhea and/or bloody stool) in order to assess possible differences among treatment groups and/or possible toxicity resulting from the treatments.

### Animals Found Dead or Moribund

[1864] Animals were monitored on a daily basis. Animals exhibiting weight loss greater than 30% were euthanized, and samples were not collected from these animals.

### Dosing

[1865] Animals were dosed with test-article via oral gavage (PO) or intracecal injection (IC) once on Day 9 as indicated in Table 12. Animals in Group 0 were not dosed. Animals in Groups 2 and 4 were dosed PO with SMAD7 antisense. Animals in Groups 3 and 5 were dosed IC with SMAD7 antisense.

### Sacrifice

[1866] All animals were euthanized by CO₂ inhalation 12 hours after dosing, on Day 10.

### Sample Collection

[1867] Intestinal contents, peripheral blood and tissue were collected at sacrifice on Day 10, as follows:

### Blood/Plasma

[1868] Terminal blood was collected into two K₂EDTA tubes and processed for plasma. The approximate volume of each blood sample was recorded prior to centrifugation. Both plasma and pellet samples were snap-frozen in liquid nitrogen and stored at −80° C. The first pellet sample (sample 1) was used for fluoremetry. The second pellet sample (sample 2) was used for RP-HPLC.

### Cecum Contents

[1869] Cecum contents was removed and contents were split into two aliquots. Both aliquots were weighed and snap frozen in separate cryovials in liquid nitrogen. The first sample (sample 1) was used for fluorometry. The second sample (sample 2) was used for RP-HPLC.

### Cecum

[1870] The cecum was excised and bisected longitudinally; each piece was separately weighed and snap-frozen. The first sample (sample 1) was used for fluoremetry. The second sample (sample 2) was used for RP-HPLC.

### Colon Contents

[1871] Colon contents were removed and contents were split into two aliquots. Both aliquots were weighed and snap frozen in separate cryovials in liquid nitrogen. The first sample (sample 1) was used for fluorometry. The second sample (sample 2) was used for RP-HPLC.

### Colon

[1872] The colon was rinsed, and the most proximal 2 cm of colon was collected and bisected longitudinally. Each piece was separately weighed and flash-frozen in liquid nitrogen. The first sample (sample 1) was used for fluorometry. The second sample (sample 2) was used for RP-HPLC.

### SMAD7 Antisense Bioanalysis

[1873] Samples flash-frozen for fluoremetry were homogenized in 0.5 mL buffer RLT+(Qiagen). Homogenate was centrifuged (4000×g; 10 minutes), and supernatant was collected. Forty microliters of the sample was diluted 1:6 in 200 μL of bicarbonate solution and 100 μL of diluted supernatant was analyzed on a fluorescent plate reader (485 excitation; 535 emission) in duplicate.

[1874] Prior to the above, assay development was performed as follows. Samples (as indicated in Sample Collection) were harvested from a naive animal and flash-frozen. Samples were then homogenized in 0.5 mL buffer RLT+, homogenate was centrifuged (4000×g; 10 minutes) and supernatant was collected and diluted 1:6 with bicarbonate solution (i.e., 0.5 mL supernatant was added to 2.5 mL of PBS). An aliquot (0.200 mL (90 μL for each duplicate) of each diluted sample was pipetted into 15 (14 dilution of FAM-AS-SAMD7+ blank control) Eppendorf tubes. One tube was set-aside to be used as a blank sample. Ten microliters of fluorescently-labeled SMAD7 antisense was then spiked into all other sample to achieve final concentrations of 50 pg/mL, 16.67 pg/mL, 5.56 pg/mL, 1.85 pg/mL, 0.62 pg/mL, 0.21 pg/mL, 0.069 pg/mL, 0.023 pg/mL, 7.6 ng/mL, 2.5 ng/mL, 0.847 ng/mL, 0.282 ng/mL, 0.094 ng/mL, and 0.024 ng/mL respectively. The fluorescently-labeled SMAD7 antisense was prepared and serially diluted such that the volume added to each organ homogenate sample was the same for each of the above concentrations. These samples were analyzed on a fluorescent plate reader (485 excitation; 535 emission) in duplicate.

### Processing for RP-HPLC

[1875] Samples flash-frozen for RP-HPLC were homogenized in buffer RLT+(Qiagen). Homogenate was centrifuged (4000×g; 10 minutes), and supernatant was used to perform RP-HPLC analysis.

### Results

[1876] The data in FIGS. 73 and 74 show that significantly more SMAD7 antisense oligonucleotide was present in cecum tissue and colon tissue for mice with or without DSS treatment that were intra-cecally administered the SMAD7 antisense oligonucleotide as compared to mice with or without DSS treatment that were orally administered the SMAD7 antisense oligonucleotide. The data in FIG. 75 show that there is about the same level of SMAD7 antisense oligonucleotide in the cecum contents of mice with or without DSS treatment that were orally or intra-cecally administered the SMAD7 antisense oligonucleotide. No SMAD7 antisense oligonucleotide was found in the plasma or white blood cell pellet of SMAD7 antisense oligonucleotide treated mice. No significant differences were observed in clinical observations, GI-specific adverse effects or toxicity due to FAM-AS-SMAD7 treatment via PO vs IC. No fluorescent detection of FAM-AS-SMAD7 was found in plasma and whole blood cell pellets across all treatment groups. A significant higher fluorescent signal (RFU) of FAM-AS-SMAD7 was found in cecum tissue when delivered intra-cecally compared with PO in both normal and DSS-induced models (FIG. 83). A slight higher RFU was also found in colon tissue when delivered intra-cecally, however, the overall signal is 10 times lower (FIG. 84). A significant higher RFU was found in colon content when delivered intra-cecally compared with PO in a normal mouse model (FIG. 85). This result was not seen in cecum content across all treatment groups (FIG. 86), indicating a better tissue absorption of oligos in cecum tissue from cecal content when delivered intra-cecally, but not in colon content at 12 hours post-treatment.

### Example 10. Comparison of the Tissue, Plasma, and GI Content Pharmacokinetics of Tacrolimus Through Oral Vs. Intra-Cecal Ingestible Device Delivery in Yorkshire-Cross Farm Swine

[1877] The primary objective of this study was to compare the tissue, plasma, rectal sample, and GI content pharmacokinetics of tacrolimus through oral versus intra-cecal ingestible device delivery in normal Yorkshire-Cross farm swine.

[1878] This study compares the effects of administration of: a single intra-cecal administration of an ingestible device containing 0.8 mL sterile vehicle solution (80% alcohol, 20% castor oil (HCO-60)); a single oral dose of tacrolimus at 4 mg/0.8 mL (in sterile vehicle solution); and a single intra-cecal administration of an ingestible device containing either 1 mg/0.8 mL (in sterile vehicle solution), 2 mg/0.8 mL (in sterile vehicle solution), or 4 mg/0.8 mL (in sterile vehicle solution).

[1879] This study employed five groups of three female swine weighing approximately 45 to 50 kg at study start. Swine were randomly placed into animal rooms/pens as they are transferred from the delivery vehicle without regard to group. Group numbers were assigned to the rooms in order of room number. No further randomization procedure was employed. The study design is provided in Table 13.

TABLE 13
Study Design Table

| | Group | | | Days Pre-Dose | | | | | Hours Post-dose | | | | | | |
|---|---|---|---|---|---|---|---|---|---|---|---|---|---|---|---|
| General | size | Dose | Route | −11 | −10 | −5 | −1 | 1 | 0.5 | 1 | 2 | 3 | 4 | 6 | 12 |
| Fast | | | | • | | | • | | | | | | | | |
| Food/Water | | ad libidum | | | • | • | | • | • | • | • | • | • | • | • |
| Observations | | | | | | | | | | | | | | | |
| clinical observations | | Day −10~−5 | | | • | • | | • | • | • | • | • | • | • | • |
| body weight* | | & Day 1 | | | • | • | | • | | | | | | | • |
| Treatments (Groups) | | | | | | | | | | | | | | | |
| 1. Vehicle control | n = 3 | 0.8 mL (20% | IC | | | | | | | | | | | | |
| | | HCO-60, 80% | | | | | | | | | | | | | |
| | | EtOH) | | | | | | | | | | | | | |
| Surgical placement of | | | | | • | | | | | | | | | | |
| IC port** | | | | | | | | | | | | | | | |
| Euthanized | | (1 Ingestible | | | | | | | | | | | | | n = 3 |
| | | Device) | | | | | | | | | | | | | |
| 2. Tacrolimus (PO) | n = 3 | 4 mg in 0.8 mL | Oral | | | | | • | | | | | | | |
| Surgical placement of | | 0.08 mg/kg | | | • | | | | | | | | | | |
| IC port** | | | | | | | | | | | | | | | |
| Euthanized | | (solution) | | | | | | | | | | | | | n = 3 |
| 3. Tacrolimus (IC) | n = 3 | 1 mg in 0.8 mL | IC | | | | | • | | | | | | | |
| Surgical placement of | | 0.02 mg/kg | | | • | | | | | | | | | | |
| IC port** | | | | | | | | | | | | | | | |
| Euthanized | | (1 Ingestible | | | | | | | | | | | | | n = 3 |
| | | Device) | | | | | | | | | | | | | |
| 4. Tacrolimus (IC) | n = 3 | 2 mg in 0.8 mL | IC | | | | | • | | | | | | | |
| Surgical placement of | | 0.04 mg/kg | | | • | | | | | | | | | | |
| IC port** | | | | | | | | | | | | | | | |
| Euthanized | | (1 Ingestible | | | | | | | | | | | | | n = 3 |
| | | Device) | | | | | | | | | | | | | |
| 5. Tacrolimus (IC) | n = 3 | 4 mg in 0.8 mL | IC | | | | | • | | | | | | | |
| Surgical placement of | | 0.08 mg/kg | | | • | | | | | | | | | | |
| IC port** | | | | | | | | | | | | | | | |
| Euthanized | | (1 Ingestible | | | | | | | | | | | | | n = 3 |
| | | Device) | | | | | | | | | | | | | |
| Tacrolimus (required) | | 20 mg | | | | | | | | | | | | | |
| Samples***** | | | | | | | | | | | | | | | |
| Plasma | | | cephalic, | | | | | • | | • | • | • | • | • | • |
| | | | jugular or | | | | | | | | | | | | |
| | | | catheter | | | | | | | | | | | | |
| Rectal contents | | | rectal | | | | | | | • | | • | | • | • |
| Tissue*** | x5 | | necropsy | | | | | | | | | | | | • |
| Luminal contents**** | x5 | | necropsy | | | | | | | | | | | | • |
| Analysis (Agrilux | Total | | | | | | | | | | | | | | |
| Charles River) | Samples | | | | | | | | | | | | | | |
| Plasma | | | | | | | | | | | | | | | |
| [Tacrolimus] | 105 | | | | | | | 15 | | 15 | 15 | 15 | 15 | 15 | 15 |
| Rectal contents | | | | | | | | | | | | | | | |
| [Tacrolimus] | 60 | | | | | | | | | 15 | | 15 | | 15 | 15 |
| Tissue (intact)*** | | | | | | | | | | | | | | | |
| [Tacrolimus] | 105 | | | | | | | | | | | | | | 105 |
| Luminal contents | | | | | | | | | | | | | | | |
| [Tacrolimus] | 75 | | | | | | | | | | | | | | 75 |
| Tissue after removing | | | | | | | | | | | | | | | |
| luminal content | | | | | | | | | | | | | | | |
| [Tacrolimus] | 75 | | | | | | | | | | | | | | 75 |

Notes:
*Animal weight was ~45-50 kg for drug doses proposed.
**Surgical placement of IC port in all animals to control.
***Tissue samples [drug] (five GI section cecum (CAC); proximal colon (PCN); transverse colon (TCN); distal colon (DCN); rectum (RTM), plus mesenteric lymph nodes and Peyer's Patch).
****Luminal contents (cecum (CAC); proximal colon (PCN); transverse colon (TCN); distal colon (DCN); rectum (RTM)).

[1880] Animals in Group 1 received an ingestible device containing 0.8 mL of vehicle solution (80% alcohol, 20% HCO-60). Animals in Group 2 received orally 4 mL liquid formulation of tacrolimus at 4 mg/0.8 mL per animal (Prograf: 5 mg/mL). Animals in Group 3 received intra-cecally an ingestible device containing tacrolimus at 1 mg in 0.8 mL per ingestible device. Animals in Group 4 received intra-cecally an ingestible device containing tacrolimus at 2 mg in 0.8 mL per ingestible device. Animals in Group 5 received intra-cecally an ingestible device containing tacrolimus at 4 mg in 0.8 mL per ingestible device. To control for potential confounding effects of the surgery, all groups fast on Day −11 at least 24 hr before being subjected to anesthesia followed by surgical placements of a cecal port by a veterinary surgeon at Day −10. All animals were fasted for at least 12 hr prior to dosing on Day 1. Animals were dosed via either intra-cecal dosing (IC) or oral dosing (PO) at Day 1 (between 6-8 p.m.). All animals resumed feeding at approximately 4 hours after dose (11-12 μm. after dosing).

[1881] Animals in Group 1 (Vehicle Control) were administered a single intra-cecal ingestible device containing 0.8 mL Vehicle solution (80% alcohol, 20% castor oil (HCO-60) on Day 1. On Day −10 the animals were anesthetized, and a veterinary surgeon surgically placed an intra-cecal port in each animal. On Day 1, each animal was placed into a sling then a single intra-cecal ingestible device containing 0.8 mL vehicle solution (80% alcohol, 20% castor oil (HCO-60)) is introduced by the veterinary surgeon into the cecum via the cecal port in each animal. Following ingestible device placement, the animals were removed from the slings and placed back into their pens with water. All animals resumed feeding at approximately 4 hours after dose. Samples of rectal contents were collected for pharmacokinetic analyses from each animal at each of 1, 3, 6, and 12 hours post-ingestible device placement using a fecal swab (rectal swab). A total of 60 samples were collected.

[1882] Approximately 200˜400 mg of rectal content were collected, if available, with a fecal swab (Copan Diagnostics Nylon Flocked Dry Swabs, 502CS01). The fecal swab was pre-weighed and weighed after collection in the collection tube (Sterile Tube and Cap No Media, PFPM913S), and the sample weight was recorded. The fecal swab was broken via the breakpoint, and was stored in the collection tube, and immediately frozen at −70° C. Whole blood (2 mL) was collected into K₂EDTA coated tubes for pharmacokinetics at each time-point of pre-dose and 1, 2, 3, 4, 6 and 12 hours post-dose. Immediately following euthanasia, tissue was collected. A total of 105 samples were collected.

[1883] For tissue necropsy, small intestine fluid and cecal fluid were collected separately from all the animals into two separate square plastic bottles, and stored at −20° C. The length and diameter of the cecum and the colon was measured from one animal in each group and recorded for reference. Tissues were collected for pharmacokinetic analyses and include mesenteric lymph nodes, a Peyer's Patch, and five gastrointestinal sections, including cecum, proximal colon, transverse colon, distal colon, and rectum. All samples were weighed, and the tissue sample weights were recorded. In each of the five gastrointestinal sections, tissue samples were collected in three different areas where the mucosal surface was visible and not covered by luminal content by using an 8.0-mm punch biopsy tool. Around 3 grams of the total punched sample were collected into a pre-weighed 15-mL conical tube, and the tissue weight was recorded. Three mesenteric lymph nodes were collected from different areas and weighed. At least one Peyer's Patch was collected and weighed. Tissues were snap-frozen in liquid nitrogen and stored frozen at approximately −70° C. or below (total of 105 samples).

[1884] Luminal contents were collected for pharmacokinetic analyses from the surface of the tissue from each of five gastrointestinal sections: cecum, proximal colon, transverse colon, distal colon, and rectum (total of 75). The contents were collected in pre-weighed 15-mL conical tubes and the sample weights were recorded. Samples were snap-frozen in liquid nitrogen stored frozen at approximately −70° C. or below.

[1885] After removing the luminal content, another set of tissue samples from 3 different areas were collected via an 8.0-mm punch biopsy in each section of the five tissue gastrointestinal sections described above. Around 3 grams of the total punched sample were collected into a pre-weighed 15-mL conical tube, and the tissue weight was recorded (total of 75). Tissues were snap-frozen in liquid nitrogen and stored frozen at approximately −70° C. or below.

[1886] A 30-cm length of jejunum (separated into two 15 cm lengths), and the remaining distal and transverse colon tissue sample (after tissue and luminal content were collected for PK) were collected in one animal in each group of treatment, snap-frozen in liquid nitrogen and stored frozen at approximately −70° C. or below. All samples for pharmacokinetic analyses were stored on dry ice before analyses.

[1887] Group 2 animals were administered a single oral dose of tacrolimus at 4 mg/0.8 mL (0.08-mg/kg) (in the vehicle solution) on Day 1. Plasma, rectal content sample, tissue collection, GI content collection and related procedures/storage/shipments was the same as those employed in Group 1.

[1888] Group 3 animals were administered a single intra-cecal ingestible device containing tacrolimus at 1-mg/0.8 mL (0.02 mg/kg) (in the vehicle solution) on Day 1 by a veterinary surgeon. Plasma, rectal content sample, tissue collection, GI content collection and related procedures/storage/shipments was the same as those employed in Group 1. All samples were analyzed for tacrolimus.

[1889] Group 4 animals were administered a single intra-cecal ingestible device of tacrolimus at 2 mg/0.8 mL (0.04 mg/kg) (in sterile vehicle solution) on Day 1 by a veterinary surgeon. Plasma, rectal content sample, tissue collection, GI content collection and related procedures/storage/shipments were the same as those employed in Group 1. All samples were analyzed for tacrolimus.

[1890] Group 5 animals are administered a single intra-cecal ingestible device containing tacrolimus at 4 mg/0.8 mL (0.08 mg/kg) (in the vehicle solution) on Day 1 by a veterinary surgeon. Plasma, rectal content sample, tissue collection, GI content collection and related procedures/storage/shipments were the same as those employed in Group 1. All samples were analyzed for tacrolimus.

[1891] Detailed clinical observations were conducted daily from Day −10 to −5, and on Day 1. Additional pen-side observations were conducted at least once each day. The animals remained under constant clinical observation for the entire 12 hours from dose until euthanasia. Body weights were collected on Day −10, Day −5, and pre-dose on Day 1. Animals were euthanized via injection of a veterinarian-approved euthanasia.

### Test Article and Formulation

[1892] 1. Vehicle solution, 20 mL
Description: 80% alcohol, 20% PEG-60 castor oil
Physical characteristics: clear liquid solution.

### 2. Prograf (Tacrolimus Injection), 10 Ampules

[1893] Description: A sterile solution containing the equivalent of 5 mg anhydrous tacrolimus in 1 mL. Tacrolimus is macrolide immunosuppressant and the active ingredient of Prograf. 0.8 mL of Prograf (5 mg/mL) was administrated through oral gavage per animal in group 2. Prograf (5 mg/mL) was diluted 2× folds (2.5 mg/mL) and 4x folds (1.25 mg/mL) by using vehicle solution. 0.8 mL of each concentration, 1.25 mg/mL, 2.5 mg/mL, and 5 mg/mL of Prograf, was injected into a DSS ingestible device for group 3, 4, and 5.
Formulation: Each mL contained polyoxyl 60 hydrogenated castor oil (HCO-60), 200 mg, and dehydrated alcohol, USP, 80.0% v/v.
Physical characteristics: clear liquid solution.

### 3. DDS Ingestible Device Containing Tacrolimus

[1894] Description: Three (3) DDS ingestible devices containing vehicle solution for Group 1, three (3) DSS ingestible devices containing 1 mg tacrolimus for Group 3, three (3) DDS ingestible devices containing 2 mg tacrolimus for Group 4, and three (3) DDS ingestible devices containing 4 mg tacrolimus for Group 5.

### Acclimation

[1895] Animals were acclimated prior to study initiation for at least 7 days. Animals in obvious poor health were not placed on study.

### Concurrent Medication

[1896] Other than veterinary-approved anesthetics and medications used during surgery to install the ileocecal ports, or for vehicle or test article administration, and analgesia and antibiotics post-surgery, no further medications were employed.

### Feed

[1897] All swine were fasted at least 24 hours before being anesthetized and properly medicated for surgery or overnight before dosing. Otherwise, animals were fed ad-libitum. Tap water was pressure-reduced and passed through a particulate filter, then a carbon filter prior to supply to an automatic watering system. Water was supplied ad libitum. There were no known contaminants in the feed or water that would be expected to interfere with this study.

### Results

[1898] The data in FIG. 76 show that the mean concentration of tacrolimus in the cecum tissue and the proximate colon tissue were higher in swine that were inta-cecally administered tacrolimus as compared to swine that were orally administered tacrolimus. All blood trough concentrations were <10 ng/mL and exposure AUC<2000-12 ng·h/mL (FIGS. 87-89). Significantly higher Cmax values (9.20 3.30 and 21.80 4.73 ng/mL) were observed in groups treated with high (0.09 mg/kg) and moderate (0.04 mg/kg) dose of tacrolimus when delivered through IC capsule as compared to the Cmax values following PO delivery of tacrolimus (0.09 mg/kg). Significantly higher tissue (spiral and transverse colon) and luminal content (spiral, transverse, and distal colon) concentrations were observed in groups treated with high and moderate dose tacrolimus delivered through IC capsule as compared to the levels observed in animals administered tacrolimus via PO. No measurable level of tracrolimus was detected in tissue when animals were delivered tacrolimus via PO, despite systemic concentrations equivalent to low dose IC group (0.02 mg/kg) (FIGS. 90 and 91). A higher rectal content concentration was observed at 12 hours post-treatment in the IC capsule groups (FIG. 92), while no detectable level was observed in the PO group.

These data suggest that intra-cecal administration of tacrolimus is able to locally deliver tacrolimus to the tissues in the GI tract of a mammal, while not decreasing the systemic immune system of a mammal.

### Example 11. Comparison of the Tissue, Plasma, and GI Content Pharmacokinetics of Adalimumab Through SC Vs. Intra-Cecal Ingestible Device Delivery in Yorkshire-Cross Farm Swine in DSS-Induced Colitis

[1899] The purpose of this non-Good Laboratory Practice (GLP) study is to explore the PK/PD and bioavailability of adalimumab when applied to (Dextran Sulfate Sodium Salt) DSS-induced colitis in Yorkshire-cross farm swine, and to evaluate topical Humira (adalimumab or ADA) in DSS-colitis in swine. Colitis was induced in weanling YorkShire-Cross farm swine by administering DSS once daily for 7 consecutive days via oral gastric intubation. The dose levels were chosen based on the doses and regimens used to induce colitis in weanling pigs. The doses of DSS were 1.275 or 2.225 g/k/day for Groups 2 and 3 respectively.

[1900] This study used one group of 19- to 21-day old weanling swine, and 2 groups of three, 19- to 20-day old weanling swine that weighed from 6.5 to 7.5 kg on arrival. To induce colitis, on study day 1 through and including day 7, animals in Groups 2 and 3 were administered once daily oral (gastric intubation) doses of DSS at 8.5% or 15% w/v for dose levels of 1.275 or 2.25 g/kg/day, respectively (Groups 2 and 3 respectively, 2 hours before morning feeding). The Group 1 control animals were administered sterile saline only. Each animal was placed in a sling for dosing. Animals were fasted at least 6 hours prior to each dose. See Study Table below.

| | | | | | | | | | Total | | |
|---|---|---|---|---|---|---|---|---|---|---|---|
| | | Animal | DSS % | mg/ | Volume | | | | DSS | ADA | |
| Group | Route | #¹ | w/v | ml | (ml) | Total g² | g/kg | Fequency³ | needed | treatment⁴ | Endpoints^{5.6,7} |
| 1 | oral/ | 1 | 0 | 0 | 105 | 0 | 0 | QD, 7 day | 0 | Day 8 | Body |
| (Animal | gastric | | | | | | | | | (Vehicle) | weights, |
| 1501) | intubation | | | | | | | | | | clinical |
| | | | | | | | | | | | signs, & |
| | | | | | | | | | | | necropsy |
| | | | | | | | | | | | and IHC at |
| | | | | | | | | | | | 3 hr post |
| | | | | | | | | | | | ADA |
| 2 | oral/ | 3 | 8.5% | 85 | 105 | 8.925 | 1.275 | QD, 7 day | 187.425 | Day 8 | Body |
| (Animals | gastric | | | | | | | | | (rectal 13 mg) | weights, |
| 2501, | intubation | | | | | | | | | | clinical |
| 2502, and | | | | | | | | | | | signs, & |
| 2504) | | | | | | | | | | | necropsy |
| | | | | | | | | | | | and IHC at |
| | | | | | | | | | | | 3 hr post |
| | | | | | | | | | | | ADA |
| 3 | oral/ | 3 | 15% | 150 | 105 | 15.75 | 2.25 | QD, 7 day | 330.75 | Day 8 | Body |
| | gastric | | | | | | | | | (rectal 13 mg) | weights, |
| | intubation | | | | | | | | | | clinical |
| | | | | | | | | | | | signs, & |
| | | | | | | | | | | | necropsy |
| | | | | | | | | | | | and IHC at |
| | | | | | | | | | | | 3 hr post |
| | | | | | | | | | | | ADA |

1. Animal weighed around 6.5-7.5 kg
2. Daily clinical signs and body weight were closely monitored throughout the study. If severe clinical signs or body weight loss is observed at day 1~3 after dosing, the DSS dosing was shortened to 5 days.
3. 0.8 mL of ADA solution was dosed rectally to the colon via an endoscope
4. Necropsy was done to observe GI inflammation and overall histopathology
5. 5-cm length opened tissue samples harvested for immunohistochemistry from terminal ileum, cecum, proximal colon; spiral colon, transverse colon; distal colon, rectum, and included other gastrointestinal sites of inflammation depending on the necropsy results.
6. ~3 g of punch biopsy sample and ~200 mg luminal content snap frozen for adalimumab measurement and three extra 5-cm length open tissue samples taking down for immunohistochemistry staining of ADA at the site where ADA was administrated. Additional tissue biopsy samples were collected from 3 different areas at proximal colon and proximal region of transverse colon in each animal.

[1901] The day following the last DSS dose, using endoscopy and a catheter, at 13 mg adalimumkab/0.8 mL/pig (one 40 mg adalimumab/0.8 mL dosage syringe was divided into 3 parts and diluted with PBS) was placed in the proximal portion of the descending colon just past the bend of the transverse colon. Alternatively, 13 mg of adalimumab was diluted with PBS to a volume suitable for dosing post-weanling swine. Prior to dosing, endoscopy photographs were taken of the mucosal surface of the colon. Animals were anesthetized during adalimumab dosing. Prior to adalimumab dosing, animals were housed on rubber mats to prevent ingestion of bedding material, and were fasted at least 24 hours. The colon was cleansed using an enema prior to the procedure.

[1902] All animals were properly euthanized approximately 3 hours post-adalimumab-dose for tissue collections and subjected to a gross necropsy with emphasis on the severity of colitis (immediately after euthanasia, in order to avoid autolytic changes). All samples for histology were fixed in a fixation medium and the punch-biopsy sample snap-frozen in liquid nitrogen and stored frozen (−70° C.).

[1903] To measure drug content, tissue samples and luminal content were collected by gently removing and collecting luminal content first, then using an 8.0 mm-punch biopsy tool. Biopsies from three different areas at the site of adalimumab administration were collected in each animal. Additional tissue biopsy samples were collected from three different areas at the proximal colon, and the proximal region of transverse colon in each animal. Approximately 3 g of total punched sample and 200 mg of luminal content were collected in a pre-weighed conical tubes and the tissue weighed was recorded.

[1904] Approximately, a 5-cm length of open gastrointestinal tissue sample including terminal ileum, cecum (CAC); proximal colon (PCN); transverse colon (TCN); spiral colon, distal colon (DCN), and rectum was collected, gently rinsed in saline to remove luminal material, and individually fixed in fixation buffer (10% neutral buffered formalin). Also, a 5-cm length of open gastrointestinal tissue from 3 different areas near the site of adalimumab administration was collected and fixed in formalin in the same manner for immunohistochemical staining for adalimumab. Tissue samples for histopathology were fixed in 10% neutral buffered formalin for 18-24 hr, and transferred to 70% ethanol. HUMIRA® was supplied in single-use, 1-mL pre-filled glass syringes, as a sterile, preservative-free solution for subcutaneous administration. The solution of HUMIRA® was clear and colorless, with a pH of about 5.2. Each syringe delivered 0.8 mL (40 mg adalimumab) of drug product. Each vial contained approximately 0.9 mL of solution to deliver 0.8 mL (40 mg adalimumab) of drug product. Each 0.8 mL HUMIRA® contained 40 mg adalimumab, 4.93 mg sodium chloride, 0.69 mg monobasic sodium phosphate dihydrate, 1.22 mg dibasic sodium phosphate dihydrate, 0.24 mg sodium citrate, 1.04 mg citric acid monohydrate, 9.6 mg mannitol, 0.8 mg polysorbate 80, and water for injection. Sodium hydroxide was added as necessary to adjust pH.

[1905] All animals were randomized into groups of three. Animals were dosed once with adalimumab via subcutaneous (SC), perirectal (PR), or intracecal (IC) administration.

[1906] The concentration of adalimumab and TNFα was measured in plasma at 1, 2, 3, 4, 6, and 12 hours post-dose. The concentration of adalimumab was measured in rectal contents at 1, 3, 6, and 12 hours post-dose and in luminal content at 12 hours post-dose. Concentration of adalimumab and TNFα, HER2, and total protein was measured in gastrointestinal tissue, e.g., cecum sample (CAC), proximal colon sample (PCN), transverse colon sample (TCN), distal colon sample (DCNi) inflamed, distal colon non-inflamed sample (DCNn), and rectum sample (RTM), at 12 hours post-dose.

[1907] Treatment with 8.5% DSS (oral; Day 1 to Day 7) induced mild body weight loss, hemorrhage diarrhea, soft bloody stool, and moderate colitis in swine. Necropsy revealed marked edema and full thickness of mucosal erosion from the proximal colon through the distal rectum. The 8.5% DSS-induced animals were treated with adalimumab at day 8. No significant differences in clinical observations, GI-specific adverse effects or toxicity due to adalimumab treatment were observed. The 15% DSS (oral; day 1 to day 7)-induced animals had marked mucosal sloughing and hemorrhage from cecum to rectum and severe colitis. All of the animals were euthanized early on day 5.

[1908] Significant lesions of colitis were found in animals treated with 8.5% DSS and were characterized by inflammation that involved mucosa and submucosa, loss of surface epithelium (erosion), and intestinal crypts (FIGS. 93 and 94). There was little, if any, evidence of regeneration. The ileum and cecum were unremarkable in all animals except cecum from one animal (animal 2504) that was treated with 8.5% DSS, which had lesions of inflammation and loss of surface and crypt epithelium (FIGS. 95-99). Lesions of colitis were significant and consistent in all other segments of the large intestine from animals treated with 8.5% DSS. The severity and character of the changes were not remarkably different among the different segments or among these animals. Staining for human IgG was most consistent and intense at the adalimumab administration site and localized to the luminal surface of the mucosal epithelium or inflammatory exudate at the luminal surface, and penetration of adalimumab is found in the lamina propria near the luminal surface (FIG. 100).

### Example 12. Human Clinical Trial of Treatment of Ulcerative Colitis Using Adalimumab

[1909] As a proof of concept, the patient population of this study is patients that (1) have moderate to severe ulcerative colitis, regardless of extent, and (2) have had an insufficient response to a previous treatment, e.g., a conventional therapy (e.g., 5-ASA, corticosteroid, and/or immunosuppressant) or a FDA-approved treatment. In this placebo-controlled eight-week study, patients are randomized. All patient undergo a colonoscopy at the start of the study (baseline) and at week 8. Patients enrolled in the study are assessed for clinical status of disease by stool frequency, rectal bleeding, abdominal pain, physician's global assessment, and biomarker levels such as fecal calprotectin and hsCRP. The primary endpoint is a shift in endoscopy scores from Baseline to Week 8. Secondary and exploratory endpoints include safety and tolerability, change in rectal bleeding score, change in abdominal pain score, change in stool frequency, change in partial Mayo score, change in Mayo score, proportion of subjects achieving endoscopy remission, proportion of subjects achieving clinical remission, change in histology score, change in biomarkers of disease such as fecal calprotectin and hsCRP, level of adalimumab in the blood/tissue/stool, change in cytokine levels (e.g., TNFα, IL-6) in the blood and tissue.

[1910] FIG. 72 describes an exemplary process of what would occur in clinical practice, and when, where, and how the ingestible device will be used. Briefly, a patient displays symptoms of ulcerative colitis, including but not limited to: diarrhea, bloody stool, abdominal pain, high c-reactive protein (CRP), and/or high fecal calprotectin. A patient may or may not have undergone a colonoscopy with diagnosis of ulcerative colitis at this time. The patient's primary care physician refers the patient. The patient undergoes a colonoscopy with a biopsy, CT scan, and/or MRI. Based on this testing, the patient is diagnosed with ulcerative colitis. Most patients are diagnosed with ulcerative colitis by colonoscopy with biopsy. The severity based on clinical symptoms and endoscopic appearance, and the extent, based on the area of involvement on colonoscopy with or without CT/MRI is documented. Treatment is determined based on diagnosis, severity and extent.

[1911] For example, treatment for a patient that is diagnosed with ulcerative colitis is an ingestible device programmed to release a single bolus of a therapeutic agent, e.g., 40 mg adalimumab, in the cecum or proximal to the cecum. Prior to administration of the treatment, the patient is fasted overnight and is allowed to drink clear fluids. Four hours after swallowing the ingestible device, the patient can resume a normal diet. An ingestible device is swallowed at the same time each day. The ingestible device is not recovered.

[1912] In some embodiments, there may be two different ingestible devices: one including an induction dose (first 8 to 12 weeks) and a different ingestible device including a different dose or a different dosing interval.

[1913] In some examples, the ingestible device can include a mapping tool, which can be used after 8 to 12 weeks of induction therapy, to assess the response status (e.g., based on one or more of the following: drug level, drug antibody level, biomarker level, and mucosal healing status). Depending on the response status determined by the mapping tool, a subject may continue to receive an induction regimen or maintenance regimen of adalimumab.

[1914] In different clinical studies, the patients may be diagnosed with Crohn's disease and the ingestible devices (including adalimumab) can be programmed to release adalimumab in the cecum, or in both the cecum and transverse colon.

[1915] In different clinical studies, the patients may be diagnosed with illeocolonic Crohn's disease and the ingestible devices (including adalimumab) can be programmed to release adalimumab in the late jejunum or in the jejunum and transverse colon.

### Example 13. Pharmacokinetic Study of Oral Vs. Intra-Cecal Administration of Tacrolimus in Yorkshire-Cross Farm Swine

[1916] The primary objective of this study was to study the pharmacokinetics of oral versus intra-cecal administration of tacrolimus in normal Yorkshire-Cross farm swine.

[1917] This study compares the effects of administration of: a single intra-cecal administration of a device containing 0.8 mL sterile vehicle solution (80% alcohol, 20% castor oil (HCO-60)); a single oral dose of tacrolimus at 0.09 mg/kg (in sterile vehicle solution); and a single intra-cecal administration of a device containing either 0.02 mg/kg (in sterile vehicle solution), 0.04 mg/kg (in sterile vehicle solution), or 0.09 mg/kg (in sterile vehicle solution).

[1918] This study employed five groups of three female swine weighing approximately 45 to 50 kg at study start. Swine were randomly placed into animal rooms/pens as they are transferred from the delivery vehicle without regard to group. Group numbers were assigned to the rooms in order of room number. No further randomization procedure was employed. The study design is provided in Table 14.

TABLE 14
Study Design

| | | | Dosage | HED | | |
|---|---|---|---|---|---|---|
| Treatments | | | mg/kg | mg | Route | Endpoints |
| Group | Vehicle | n = 3 | 0 | 0 | Intra-cecal | [Tacrolimus] in |
| 1 | control | | | | capsule | blood and rectal |
| | | | | | | content at 1~12 |
| Group | Tacrolimus | n = 3 | 0.09 | 6.60 | Oral solution | hr post dose, and |
| 2 | | | | | | GI tissue & GI |
| Group | Tacrolimus | n = 3 | 0.02 | 1.65 | Intra-cecal | content at 12 hr |
| 3 | | | | | capsule | post dose |
| Group | Tacrolimus | n = 3 | 0.04 | 3.30 | Intra-cecal | |
| 4 | | | | | capsule | |
| Group | Tacrolimus | n = 3 | 0.09 | 6.60 | Intra-cecal | |
| 5 | | | | | capsule | |

[1919] Animals in Group 1 received intra-cecally a device containing a vehicle solution (80% alcohol, 20% HCO-60). Animals in Group 2 received orally a liquid formulation of tacrolimus at 0.09 mg/kg per animal. Animals in Group 3 received intra-cecally a device containing tacrolimus at 0.02 mg/kg per device. Animals in Group 4 received intra-cecally a device containing tacrolimus 0.04 mg/kg per device. Animals in Group 5 received intra-cecally a device containing tacrolimus 0.09 mg/kg per device.

[1920] Samples of rectal contents were collected for pharmacokinetic analyses from each animal at each of 1, 3, 6, and 12 hours post-device placement using a fecal swab (rectal swab).

[1921] The concentration of tacrolimus measured was measured in the blood at 1-, 2-, 3-, 4-, 6-, and 12-hours post-dose. The concentration of tacrolimus was measured in rectal contents at 1-, 3-, 6-, and 12-hours post-dose, and in the gastrointestinal tissue and luminal content, e.g., the cecum tissue and lumen, the proximal colon tissue and lumen, the spiral colon tissue and lumen, the transverse colon tissue and lumen, and the distal colon tissue and lumen, at 12 hours post-dose.

### Results

[1922] The data in FIGS. 77 and 78 show that the mean concentration and AUC_{0-12 hours} of tacrolimus in the blood was higher in swine that were intra-cecally administered tacrolimus as compared to swine that were orally administered tacrolimus even at the same concentration (0.09 mg/kg). The data in FIG. 79 show that the mean concentration of tacrolimus in the spiral colon tissue and the transverse colon tissue were statistically higher in swine that were inta-cecally administered tacrolimus as compared to swine that were orally administered tacrolimus. The data in FIG. 80 show that the mean concentration of tacrolimus in the spiral colon lumen, the transverse colon lumen, and the distal colon lumen were statistically higher in swine that were inta-cecally administered tacrolimus as compared to swine that were orally administered tacrolimus. The data in FIGS. 81 and 82 show that the mean concentration of tacrolimus in the rectal concent was higher in swine that were intra-cecally administered tacrolimus as compared to swine that were orally administered tacrolimus even at the same concentration, particularly at 12 hours post-dose.

[1923] These data suggest that intra-cecal administration of tacrolimus is able to locally deliver tacrolimus to the tissues in the GI tract of a mammal.

[1924] A summary of the results are shown in Table 15.

TABLE 15
Summary of Results

| Route | PO | IC | IC | IC |
|---|---|---|---|---|
| Dosage (mg/kg) | 0.09 | 0.02 | 0.04 | 0.09 |
| Cmax (ng/ml) | 3.53 ± | 2.39 ± | 9.197 ± | 21.8 ± |
| | 3.84 | 0.57 | 3.30 | 4.73 |
| Trough (12 hr) | 0.568 ± | 0.746 ± | 1.96 ± | 4.35 ± |
| (ng/ml) | 0.291 | 0.038 | 0.491 | 0.561 |
| AUC_{0-12 hr} | 16.83 ± | 15.29 ± | 51.35 ± | 129.6 ± |
| (ng · hr/ml) | 3.641 | 2.36 | 4.04 | 7.83 |

[1925] Tables 16 and 17 provide the tissue and plasma ratios of the animals in Groups 2-5.

TABLE 16-1
Tissue ₍ₘₑₐₙ₎ (ng/g)/AUG_{(0-12 hr)}(ng·hr/ml) ratios

| | Group 2 PO (0.09 mg/kg) | | | Group 3 IC (0.02 mg/kg) | | |
|---|---|---|---|---|---|---|
| | Tissue | AUC 0-12 hr | | Tissue | AUC 0-12 hr | |
| | (ng/g) | (ng·hr/ml) | Ratio | (ng/g) | (ng·hr/ml) | Ratio |
| Cecum | | 16.83 | 0 | | 15.29 | 0.00 |
| Proximal | | 16.83 | 0 | 50.20 | 15.29 | 3.28 |
| Colon | | | | | | |
| Spiral colon | | 16.83 | 0 | 204.00 | 15.29 | 13.34 |
| Transverse | | 16.83 | 0 | 128.20 | 15.29 | 8.38 |
| colon | | | | | | |
| Distal Colon | | 16.83 | 0 | 44.70 | 15.29 | 2.92 |

TABLE 16-2
Tissue ₍ₘₑₐₙ₎ (ng/g)/AUG_{(0-12 hr)}(ng·hr/ml) ratios

| | Group 4 IC (0.04 mg/kg) | | | Group 5 IC (0.09 mg/kg) | | |
|---|---|---|---|---|---|---|
| | Tissue | AUC 0-12 hr | | Tissue | AUC 0-12 hr | |
| | (ng/g) | (ng·hr/ml) | Ratio | (ng/g) | (ng·hr/ml) | Ratio |
| Cecum | 52.3 | 51.35 | 1.019 | 77.3 | 129.6 | 0.60 |
| Proximal | 98.3 | 51.35 | 1.914 | 157.0 | 129.6 | 1.21 |
| Colon | | | | | | |
| Spiral colon | 342.3 | 51.35 | 6.667 | 783.3 | 129.6 | 6.04 |
| Transverse | 85.8 | 51.35 | 1.670 | 272.0 | 129.6 | 2.10 |
| colon | | | | | | |
| Distal Colon | 28.7 | 51.35 | 0.559 | 67.7 | 129.6 | 0.52 |

TABLE 17-1
Tissue ₍ₘₑₐₙ₎ (ng/g)/Trough_{(12 hr)}(ng/ml)

| | Group 2 PO (0.09 mg/kg) | | | Group 3 IC (0.02 mg/kg) | | |
|---|---|---|---|---|---|---|
| | Tissue | Trough level | | Tissue | Trough level | |
| | (ng/g) | (12 hr) | Ratio | (ng/g) | (12 hr) | Ratio |
| Cecum | | 0.568 | 0 | | 0.746 | 0.00 |
| Proximal | | 0.568 | 0 | 50.20 | 0.746 | 67.29 |
| Colon | | | | | | |
| Spiral colon | | 0.568 | 0 | 204.00 | 0.746 | 273.46 |
| Transverse | | 0.568 | 0 | 128.20 | 0.746 | 171.85 |
| colon | | | | | | |
| Distal Colon | | 0.568 | 0 | 44.70 | 0.746 | 59.92 |

TABLE 17-2
Tissue ₍ₘₑₐₙ₎ (ng/g)/Trough_{(12 hr)}(ng·hr/ml)

| | Group 4 IC (0.04 mg/kg) | | | Group 5 IC (0.09 mg/kg) | | |
|---|---|---|---|---|---|---|
| | Tissue | Trough | | Tissue | Trough | |
| | (ng/g) | level (12 hr) | Ratio | (ng/g) | level (12 hr) | Ratio |
| Cecum | 52.3 | 1.96 | 26.684 | 77.3 | 4.35 | 17.78 |
| Proximal | 98.3 | 1.96 | 50.136 | 157.0 | 4.35 | 36.09 |
| Colon | | | | | | |
| Spiral colon | 342.3 | 1.96 | 174.660 | 783.3 | 4.35 | 180.08 |
| Transverse | 85.8 | 1.96 | 43.759 | 272.0 | 4.35 | 62.53 |
| colon | | | | | | |
| Distal Colon | 28.7 | 1.96 | 14.643 | 67.7 | 4.35 | 15.56 |

### Example 14

[1926] An ingestible medical device according to the disclosure (“TLC1”) was tested on 20 subjects to investigate its localization ability. TLC1 was a biocompatible polycarbonate ingestible device that contained a power supply, electronics and software. An onboard software algorithm used time, temperature and reflected light spectral data to determine the location of the ingestible device as it traveled the GI tract. The ingestible device is 0.51×1.22 inches which is larger than a vitamin pill which is 0.4×0.85 inches. The subjects fasted overnight before participating in the study. Computerized tomography (“CT”) were used as a basis for determining the accuracy of the localization data collected with TLC1. One of the 20 subjects did not follow the fasting rule. CT data was lacking for another one of the 20 subjects. Thus, these two subjects were excluded from further analysis. TLC1 sampled RGB data (radially transmitted) every 15 seconds for the first 14 hours after it entered the subject's stomach, and then samples every five minutes after that until battery dies. TLC1 did not start to record optical data until it reached the subject's stomach. Thus, there was no RGB-based data for the mouth-esophagus transition for any of the subjects.

[1927] In addition, a PillCam© SB (Given Imaging) device was tested on 57 subjects. The subjects fasted overnight before joining the study. PillCam videos were recorded within each subject. The sampling frequency of PillCam is velocity dependent. The faster PillCam travels, the faster it would sample data. Each video is about seven to eight hours long, starting from when the ingestible device was administrated into the subject's mouth. RGB optical data were recorded in a table. A physician provided notes on where stomach-duodenum transition and ileum-cecum transition occurred in each video. Computerized tomography (“CT”) was used as a basis for determining the accuracy of the localization data collected with PillCam.

### Esophagus-Stomach Transition

[1928] For TLC1, it was assumed that this transition occurred one minute after the patient ingested the device. For PillCam, the algorithm was as follows:
[1929] 1. Start mouth-esophagus transition detection after ingestible device is activated/administrated
[1930] 2. Check whether Green<102.3 and Blue<94.6
   [1931] a. If yes, mark as mouth-esophagus transition
   [1932] b. If no, continue to scan the data
[1933] 3. After detecting mouth-esophagus transition, continue to monitor Green and Blue signals for another 30 seconds, in case of location reversal
   [1934] a. If either Green>110.1 or Blue>105.5, mark it as mouth-esophagus location reversal
   [1935] b. Reset the mouth-esophagus flag and loop through step 2 and 3 until the confirmed mouth-esophagus transition detected
[1936] 4. Add one minute to the confirmed mouth-esophagus transition and mark it as esophagus-stomach transition

[1937] For one of the PillCam subjects, there was not a clear cut difference between the esophagus and stomach, so this subject was excluded from future analysis of stomach localization. Among the 56 valid subjects, 54 of them have correct esophagus-stomach transition localization. The total agreement is 54/56=96%. Each of the two failed cases had prolonged esophageal of greater than one minute. Thus, adding one minute to mouth-esophagus transition was not enough to cover the transition in esophagus for these two subjects.

### Stomach-Duodenum

[1938] For both TLC1 and PillCam, a sliding window analysis was used. The algorithm used a dumbbell shape two-sliding-window approach with a two-minute gap between the front (first) and back (second) windows. The two-minute gap was designed, at least in part, to skip the rapid transition from stomach to small intestine and capture the small intestine signal after ingestible device settles down in small intestine. The algorithm was as follows:
[1939] 1. Start to check for stomach-duodenum transition after ingestible device enters stomach
[1940] 2. Setup the two windows (front and back)
   [1941] a. Time length of each window: 3 minutes for TLC1; 30 seconds for PillCam
   [1942] b. Time gap between two windows: 2 minutes for both devices
   [1943] c. Window sliding step size: 0.5 minute for both devices
[1944] 3. Compare signals in the two sliding windows
   [1945] a. If difference in mean is higher than 3 times the standard deviation of Green/Blue signal in the back window
      [1946] i. If this is the first time ever, record the mean and standard deviation of signals in the back window as stomach reference
      [1947] ii. If mean signal in the front window is higher than stomach reference signal by a certain threshold (0.3 for TLC1 and 0.18 for PillCam), mark this as a possible stomach-duodenum transition
   [1948] b. If a possible pyloric transition is detected, continue to scan for another 10 minutes in case of false positive flag
      [1949] i. If within this 10 minutes, location reversal is detected, the previous pyloric transition flag is a false positive flag. Clear the flag and continue to check
      [1950] ii. If no location reversal has been identified within 10 minutes following the possible pyloric transition flag, mark it as a confirmed pyloric transition
   [1951] c. Continue monitoring Green/Blue data for another 2 hours after the confirmed pyloric transition, in case of location reversal
      [1952] i. If a location reversal is identified, flag the timestamp when reversal happened and then repeat steps a-c to look for the next pyloric transition
      [1953] ii. If the ingestible device has not gone back to stomach 2 hours after previously confirmed pyloric transition, stops location reversal monitoring and assume the ingestible device would stay in intestinal area

[1954] For TLC1, one of the 18 subjects had too few samples (<3 minutes) taken in the stomach due to the delayed esophagus-stomach transition identification by previously developed localization algorithm. Thus, this subject was excluded from the stomach-duodenum transition algorithm test. For the rest of the TLC1 subjects, CT images confirmed that the detected pyloric transitions for all the subjects were located somewhere between stomach and jejunum. Two out of the 17 subjects showed that the ingestible device went back to stomach after first the first stomach-duodenum transition. The total agreement between the TLC1 algorithm detection and CT scans was 17/17=100%.

[1955] For one of the PillCam subjects, the ingestible device stayed in the subject's stomach all the time before the video ended. For another two of the PillCam subjects, too few samples were taken in the stomach to run the localization algorithm. These three PillCam subjects were excluded from the stomach-duodenum transition localization algorithm performance test. The performance summary of pyloric transition localization algorithm for PillCam was as follows:
[1956] 1. Good cases (48 subjects):
   [1957] a. For 25 subjects, our detection matches exactly with the physician's notes
   [1958] b. For 19 subjects, the difference between the two detections is less than five minutes
   [1959] c. For four subjects, the difference between the two detections is less than 10 minutes (The full transition could take up to 10 minutes before the G/B signal settled)
[1960] 2. Failed cases (6 subjects):
   [1961] a. Four subjects had high standard deviation of Green/Blue signal in the stomach
   [1962] b. One subject had bile in the stomach, which greatly affected Green/Blue in stomach
   [1963] c. One subject had no Green/Blue change at pyloric transition

[1964] The total agreement for the PillCam stomach-duodenum transition localization algorithm detection and physician's notes was 48/54=89%.

### Duodenum-Jejunum Transition

[1965] For TLC1, it was assumed that the device left the duodenum and entered the jejunum three minutes after it was determined that the device entered the duodenum. Of the 17 subjects noted above with respect to the TLC1 investigation of the stomach-duodenum transition, 16 of the subjects mentioned had CT images that confirmed that the duodenum-jejunum transition was located somewhere between stomach and jejunum. One of the 17 subjects had a prolonged transit time in duodenum. The total agreement between algorithm detection and CT scans was 16/17=94%.

[1966] For PillCam, the duodenum-jejunum transition was not determined.

### Jejunum-Ileum Transition

[1967] It is to be noted that the jejunum is redder and more vascular than ileum, and that the jejunum has a thicker intestine wall with more mesentery fat. These differences can cause various optical responses between jejunum and ileum, particularly for the reflected red light signal. For both TLC1 and PillCam, two different approaches were explored to track the change of red signal at the jejunum-ileum transition. The first approach was a single-sliding-window analysis, where the window is 10 minutes long, and the mean signal was compared with a threshold value while the window was moving along. The second approach was a two-sliding-window analysis, where each window was 10 minutes long with a 20 minute spacing between the two windows. The algorithm for the jejunum-ileum transition localization was as follows:
[1968] 1. Obtain 20 minutes of Red signal after the duodenum-jejunum transition, average the data and record it as the jejunum reference signal
[1969] 2. Start to check the jejunum-ileum transition 20 minutes after the device enters the jejunum
   [1970] a. Normalize the newly received data by the jejunum reference signal
   [1971] b. Two approaches:
      [1972] i. Single-sliding-window analysis
         [1973] Set the transition flag if the mean of reflected red signal is less than 0.8
      [1974] ii. Two-sliding-window analysis:
         [1975] Set the transition flag if the mean difference in reflected red is higher than 2× the standard deviation of the reflected red signal in the front window

[1976] For TLC1, 16 of the 18 subjects had CT images that confirmed that the detected 20 jejunum-ileum transition fell between jejunum and cecum. The total agreement between algorithm and CT scans was 16/18=89%. This was true for both the single-sliding-window and double-sliding-window approaches, and the same two subjects failed in both approaches.

[1977] The performance summary of the jejunum-ileum transition detection for PillCam is listed below:
[1978] 1. Single-sliding-window analysis:
   [1979] a. 11 cases having jejunum-ileum transition detected somewhere between jejunum and cecum
   [1980] b. 24 cases having jejunum-ileum transition detected after cecum
   [1981] c. 19 cases having no jejunum-ileum transition detected
   [1982] d. Total agreement: 11/54=20%
[1983] 2. Two-sliding-window analysis:
   [1984] a. 30 cases having jejunum-ileum transition detected somewhere between jejunum and cecum
   [1985] b. 24 cases having jejunum-ileum transition detected after cecum
   [1986] c. Total agreement: 30/54=56%

### Ileum-Cecum Transition

[1987] Data demonstrated that, for TLC1, mean signal of reflected red/green provided the most statistical difference before and after the ileum-cecum transition. Data also demonstrated that, for TLC1, the coefficient of variation of reflected green/blue provided the most statistical contrast at ileum-cecum transition. The analysis based on PillCam videos showed very similar statistical trends to those results obtained with TLC1 device. Thus, the algorithm utilized changes in mean value of reflected red/green and the coefficient of variation of reflected green/blue. The algorithm was as follows:
[1988] 1. Start to monitor ileum-cecum transition after the ingestible device enters the stomach
[1989] 2. Setup the two windows (front (first) and back (second))
   [1990] a. Use a five-minute time length for each window
   [1991] b. Use a 10-minute gap between the two windows
   [1992] c. Use a one-minute window sliding step size
[1993] 3. Compare signals in the two sliding windows
   [1994] a. Set ileum-cecum transition flag if
      [1995] i. Reflected red/green has a significant change or is lower than a threshold
      [1996] ii. Coefficient of variation of reflected green/blue is lower than a threshold
   [1997] b. If this is the first ileum-cecum transition detected, record average reflected red/green signal in small intestine as small intestine reference signal
   [1998] c. Mark location reversal (i.e. ingestible device returns to terminal ileum) if
      [1999] i. Reflected red/green is statistically comparable with small intestine reference signal
      [2000] ii. Coefficient of variation of reflected green/blue is higher than a threshold
   [2001] d. If a possible ileum-cecum transition is detected, continue to scan for another 10 minutes for TLC1 (15 minutes for PillCam) in case of false positive flag
      [2002] i. If within this time frame (10 minutes for TLC1, 15 minutes for PillCam), location reversal is detected, the previous ileum-cecum transition flag is a false positive flag. Clear the flag and continue to check
      [2003] ii. If no location reversal has been identified within this time frame (10 minutes for TLC1, 15 minutes for PillCam) following the possible ileum-cecum transition flag, mark it as a confirmed ileum-cecum transition
   [2004] e. Continue monitoring data for another 2 hours after the confirmed ileum-cecum transition, in case of location reversal
      [2005] i. If a location reversal is identified, flag the timestamp when reversal happened and then repeat steps a-d to look for the next ileum-cecum transition
      [2006] ii. If the ingestible device has not gone back to small intestine 2 hours after previously confirmed ileum-cecum transition, stop location reversal monitoring and assume the ingestible device would stay in large intestinal area

[2007] The flag setting and location reversal criteria particularly designed for TLC1 device were as follows:
[2008] 1. Set ileum-cecum transition flag if
   [2009] a. The average reflected red/Green in the front window is less than 0.7 or mean difference between the two windows is higher than 0.6
   [2010] b. And the coefficient of variation of reflected green/blue is less than 0.02
[2011] 2. Define as location reversal if
   [2012] a. The average reflected red/green in the front window is higher than small intestine reference signal
   [2013] b. And the coefficient of variation of reflected green/blue is higher than 0.086

[2014] For TLC1, 16 of the 18 subjects had CT images that confirmed that the detected ileum-cecum transition fell between terminal ileum and colon. The total agreement between algorithm and CT scans was 16/18=89%. Regarding those two subject where the ileum-cecum transition localization algorithm failed, for one subject the ileum-cecum transition was detected while TLC1 was still in the subject's terminal ileum, and for the other subject the ileum-cecum transition was detected when the device was in the colon.

[2015] Among the 57 available PillCam endoscopy videos, for three subjects the endoscopy video ended before PillCam reached cecum, and another two subjects had only very limited video data (less than five minutes) in the large intestine. These five subjects were excluded from ileum-cecum transition localization algorithm performance test. The performance summary of ileum-cecum transition detection for PillCam is listed below:
[2016] 1. Good cases (39 subjects):
   [2017] a. For 31 subjects, the difference between the PillCam detection and the physician's notes was less than five minutes
   [2018] b. For 3 subjects, the difference between the PillCam detection and the physician's notes was less than 10 minutes
   [2019] c. For 5 subjects, the difference between the PillCam detection and the physician's notes was less than 20 minutes (the full transition can take up to 20 minutes before the signal settles)
[2020] 2. Marginal/bad cases (13 subjects):
   [2021] a. Marginal cases (9 subjects)
      [2022] i. The PillCam ileum-cecum transition detection appeared in the terminal ileum or colon, but the difference between the two detections was within one hour
   [2023] b. Failed cases (4 subjects)
      [2024] i. Reasons of failure:
         [2025] 1. The signal already stabilized in the terminal ileum
         [2026] 2. The signal was highly variable from the entrance to exit
         [2027] 3. There was no statistically significant change in reflected red/green at ileum-cecum transition

[2028] The total agreement between ileocecal transition localization algorithm detection and the physician's notes is 39/52=75% if considering good cases only. Total agreement including possibly acceptable cases is 48/52=92.3%

### Cecum-Colon Transition

[2029] Data demonstrated that, for TLC1, mean signal of reflected red/green provided the most statistical difference before and after the cecum-colon transition. Data also demonstrated that, for TLC1, the coefficient of variation of reflected blue provided the most statistical contrast at cecum-colon transition. The same signals were used for PillCam. The cecum-colon transition localization algorithm was as follows:
[2030] 1. Obtain 10 minutes of reflected red/green and reflected blue signals after ileum-cecum transition, average the data and record it as the cecum reference signals
[2031] 2. Start to check cecum-colon transition after ingestible device enters cecum (The cecum-colon transition algorithm is dependent on the ileum-cecum transition flag)
   [2032] a. Normalize the newly received data by the cecum reference signals
   [2033] b. Two-sliding-window analysis:
      [2034] i. Use two adjacent 10 minute windows
      [2035] ii. Set the transition flag if any of the following criteria were met
         [2036] The mean difference in reflected red/green was more than 4× the standard deviation of reflected red/green in the back (second) window
         [2037] The mean of reflected red/green in the front (first) window was higher than 1.03
         [2038] The coefficient of variation of reflected blue signal in the front (first) window was greater than 0.23

[2039] The threshold values above were chosen based on a statistical analysis of data taken by TLC1.

[2040] For TLC1, 15 of the 18 subjects had the cecum-colon transition detected somewhere between cecum and colon. One of the subjects had the cecum-colon transition detected while TLC1 was still in cecum. The other two subjects had both wrong ileum-cecum transition detection and wrong cecum-colon transition detection. The total agreement between algorithm and CT scans was 15/18=83%.

[2041] For PillCam, for three subjects the endoscopy video ended before PillCam reached cecum, and for another two subjects there was very limited video data (less than five minutes) in the large intestine. These five subjects were excluded from cecum-colon transition localization algorithm performance test. The performance summary of cecum-colon transition detection for PillCam is listed below:
[2042] 1. 27 cases had the cecum-colon transition detected somewhere between the cecum and the colon
[2043] 2. one case had the cecum-colon transition detected in the ileum
[2044] 3. 24 cases had no cecum-colon transition localized

[2045] The total agreement: 27/52=52%.

[2046] The following table summarizes the localization accuracy results.

| Transition | TLC1 | PillCam |
|---|---|---|
| Stomach-Duodenum | 100% (17/17) | 89% (48/54) |
| Duodenum-Jejunum | 94% (16/17) | N/A |
| Ileum-Cecum | 89% (16/18) | 75% (39/52) |
| Ileum-terminal | 100% (18/18) | 92% (48/52) |
| ileum/cecum/colon | | |

### Example 16. Intracecal Administration of Therapeutic Antibodies in a Colitis Animal Model that has Previously Received an Adoptive T-Cell Transfer

[2047] A set of experiments were performed to compare the efficacy of an anti-IL12 p40 antibody and an anti-TNFα antibody when dosed systemically versus intracecally in the treatment of colitis induced through adoptive transfer of a subpopulation of CD44⁻/CD62L⁺ T cells isolated from C57BI/6 donor mice into RAG2^{-/-} recipients.

### Materials

### Test System

[2048] Species/strain: Mice, C57Bl/6 (donors) and RAG2^{-/-} (recipients; C57Bl/6 background)
[2049] Physiological state: Normal/immunodeficient
[2050] Age/weight range at start of study: 6-8 weeks (20-24 g)
[2051] Animal supplier: Taconic
[2052] Randomization: Mice were randomized into seven groups of 15 mice each, and two groups of eight mice each.
[2053] Justification: T cells isolated from male C57Bl/6 wild type donors were transferred into male RAG2^{-/-} recipient mice to induce colitis.
[2054] Replacement: Animals were not replaced during the course of the study.

### Animal Housing and Environment

[2055] Housing: Mice were housed in groups of 8-15 animals per cage prior to cannulation surgery. After cannulation surgery, cannulated animals were single-housed for seven days post-surgery. After this point, animals were again group-housed as described above. Non-cannulated animals (Group 9) were housed at 8 mice per cage. ALPHA-Dri® bedding was used. Prior to colitis induction (i.e., during the cannulation surgeries), bedding was changed a minimum of once per week. After colitis induction, bedding was changed every two weeks, with ¼ of dirty cage material captured and transferred to the new cage. Additionally, bedding from Group 9 animals was used to supplement the bedding for all other groups at the time of cage change.
[2056] Acclimation: Animals were acclimatized for a minimum of 7 days prior to study commencement. During this period, the animals were observed daily in order to reject animals that presented in poor condition.
[2057] Environmental conditions: The study was performed in animal rooms provided with filtered air at a temperature of 70+/−5° F. and 50%+/−20% relative humidity. Animal rooms were set to maintain a minimum of 12 to 15 air changes per hour. The room was on an automatic timer for a light/dark cycle of 12 hours on and 12 hours off, with no twilight.
[2058] Food/water and contaminants: Animals were maintained with Labdiet 5053 sterile rodent chow. Sterile water was provided ad libitum.

### Test Articles

[2059] Test Article: IgG Control
[2060] Name of the Test Article: InVivoMAb polyclonal rat IgG
[2061] Source: BioXCell, catalog # BE0094
[2062] Storage conditions: 4° C.
[2063] Vehicle: Sterile PBS
[2064] Formulation Stability: Prepare fresh daily
[2065] Dose: 0.625 mg/mouse; 0.110 mL/mouse IP and IC
[2066] Frequency and duration of dosing: Days 0-49. 3×/week (IP—Group 3); QD (IC—Group 4)
[2067] Route and method of administration: IP or IC

### Formulation:

[2068] For Group 3: On each day of dosing, dilute stock pAb to achieve 2.145 mL of a 5.68 mg/mL solution
For Group 4: On each day of dosing, dilute stock pAb to achieve 2.145 mL of a 5.68 mg/mL solution
[2069] Test Article: Anti-IL12 p40
[2070] Name of the Test Article: InVivoMAb anti-mouse IL-12 p40
[2071] Source: BioXCell, catalog # BE0051
[2072] Storage conditions: 4° C.
[2073] Vehicle: Sterile PBS
[2074] Formulation Stability: Prepare fresh daily
[2075] Dose: 0.625 mg/mouse (IP and IC); 0.110 mL/mouse IP and IC
[2076] Frequency and duration of dosing: Days 0-49. 3×/week (IP—Group 5); QD (IC—Group 6);
[2077] Route and method of administration: IP or IC

### Formulation:

[2078] For Group 5: On each dosing day, the stock mAb was diluted to achieve 1.716 mL of a 5.68 mg/mL solution.
For Group 6: On each dosing day, the stock mAb was diluted to achieve 1.716 mL of a 5.68 mg/mL solution.
[2079] Test Article: anti-TNFα
[2080] Name of the Test Article: InVivoPlus anti-mouse TNFα, clone XT3.11
[2081] Source: BioXCell, catalog # BP0058
[2082] Storage conditions: 4° C.
[2083] Vehicle: Sterile PBS
[2084] Formulation Stability: Prepare fresh daily
[2085] Dose: 0.625 mg/mouse (IP and IC); 0.110 mL/mouse IP and IC
[2086] Frequency and duration of dosing: Days 0-49. 3×/week (IP—Group 7); QD (IC—Group 8);
[2087] Route and method of administration: IP or IC

### Formulation:

[2088] For Group 7:On each dosing day, the stock mAb was diluted to achieve 1.716 mL of a 5.68 mg/mL solution.
For Group 8: On each dosing day, the stock mAb was diluted to achieve 1.716 mL of a 5.68 mg/mL solution.

### Methods

[2089] The details of the study design are summarized in Table 18. A detailed description of the methods used in this study is also provided below.

TABLE 18
Study Design

| | | | Cell | | | | | Blood | | |
|---|---|---|---|---|---|---|---|---|---|---|
| | No | Cecal | Transfer | | | | Schedule | Collection | | Endpoints |
| Group | Animals | Cannula | (Day 0) | Treatment | Dose* | Route | (Days 0-42) | (RO) | Endoscopy | (Day 42) |
| 1 | 8 | YES | — | — | — | — | — | Day 13 | Days | 3 Hours |
| | | | | | | | | | 14, 28, 42 | Post Dose: |
| 2 | 15 | | 0.5 ×10⁶ | Vehicle | — | IP; IC: | IP: | | | Colon |
| | | | naïve | (PBS; IP) | | | 3×/week | | | weight/ |
| | | | T_{H} | Vehicle | | | IC: QD | | | Length, |
| | | | cells | (PBS; IC) | | | | | | stool score |
| 3 | 15 | | | IgG Control | 625 μg | | IP: | | | Terminal |
| | | | | (IP) | | | 3×/week | | | collection |
| | | | | Vehicle | | | IC: QD | | | (all |
| | | | | (PBS; IC) | | | | | | groups): |
| 4 | 15 | | | Vehicle | 625 μg | | IP: | | | Cecal |
| | | | | (PBS; IP) | | | 3×/week | | | Contents, |
| | | | | IgG Control | | | IC: QD | | | Colon |
| | | | | (IC) | | | | | | Contents, |
| 5 | 15 | | | Anti-IL12p40 | 625 μg | | IP: | | | Plasma, |
| | | | | (IP) | | | 3×/week | | | small |
| | | | | Vehicle | | | IC: QD | | | intestinal |
| | | | | (PBS; IC) | | | | | | tissue, |
| 6 | 15 | | | Vehicle | 625 μg | | IP: | | | colon |
| | | | | (PBS; IP) | | | 3×/week | | | tissue, |
| | | | | Anti-IL12p40 | | | IC: QD | | | mLN, and |
| | | | | (IC) | | | | | | |
| 7 | 15 | | | Anti-TNFα | 625 μg | | IP: | | | Peyer’s |
| | | | | (IP) | | | 3×/week | | | Patches |
| | | | | Vehicle | | | IC: QD | | | |
| | | | | (PBS; IC) | | | | | | |
| 8 | 15 | | | Vehicle | 625 μg | | IP: | | | |
| | | | | (PBS; IP) | | | 3×/week | | | |
| | | | | Anti-TNFα (IC) | | | IC: QD | | | |
| 9 | 8 | NO | — | — | — | — | — | — | — | — |

[2090] A minimum of 10-14 days prior to the start of the experiment a cohort of animals underwent surgical implantation of a cecal cannula. A sufficient number of animals underwent implantation to allow for enough cannulated animals to be enrolled in the main study. An additional n=8 animals (Group 9) served as no surgery/no disease controls.

[2091] Colitis was induced on Day 0 in male RAG2^{-/-} mice by IP injection of 0.5×10⁶ CD44⁻/CD62L⁺ T cells isolated and purified from C57Bl/6 recipients. The donor cells were processed by first harvesting spleens from 80 C57Bl/6 mice and then isolating the CD44⁻/CD62L⁺ T cells using Miltenyi Magnetic-Activated Cell Sorting (MACS) columns. An additional eight mice (Group 1) served as no-disease controls, and eight mice (Group 9) served as no-cannulation and no-disease controls (sentinel animals for bedding). All recipient mice were weighed daily and assessed visually for the presence of diarrhea and/or bloody stool. The cages were changed every two weeks starting on Day 7, with care taken to capture ¼ of dirty cage material for transfer to the new cage. On Day 13, blood was collected via RO eye bleed, centrifuged, and plasma was aliquoted (50 μL and remaining) and frozen for downstream analysis. The pelleted cells were re-suspended in buffer to determine the presence of T cells by FACS analysis of CD45⁺/CD4⁺ events.

[2092] Treatment with test article was initiated on Day 0 and was continued until Day 42 as outlined in Table 18. The animals in Groups 1 and 9 (n=8 per group; naive controls) were not treated with test article. The animals in Group 2 were treated IP with vehicle (PBS) 3×/week and IC with vehicle QD. The animals in Group 3 were treated IP with IgG control 3×/week and IC with vehicle (PBS) QD. The animals in Group 4 were treated IP with vehicle (PBS) 3×/week and IC with IgG control QD. The animals in Group 5 were treated IP with anti-IL12 p40 antibody 3×/week and IC with vehicle QD. The animals in Group 6 were treated IP with vehicle 3×/week and IC with anti-IL12 p40 antibody QD. The animals in Group 7 were treated IP with anti-TNFα antibody 3×/week and IC with vehicle QD. The animals in Group 8 were treated IP with vehicle 3×/week and IC with anti-TNFα antibody QD.

[2093] The mice underwent HD video endoscopy on Days 14 (pre-dosing; baseline), 28, and 42 (before euthanasia) in order to assess colitis severity. Images were captured from each animal at the most severe region of disease identified during endoscopy. Additionally, stool consistency was scored during endoscopy using the parameters described herein. Following endoscopy on Day 42, the animals from all groups were sacrificed and terminal samples were collected.

[2094] The animals were euthanized by CO₂ inhalation three hours after dosing on Day 42. Terminal blood samples were collected and plasma obtained from these samples. The resulting plasma was split into two separate cryotubes, with 50 μL in one tube (Bioanalysis) and the remainder in a second tube (TBD). The cecum and colon contents were removed and the contents collected, weighed, and snap frozen in separate cryovials. The mesenteric lymph nodes were collected and flash-frozen in liquid nitrogen. The small intestine were excised and rinsed, and the most distal 2-cm of ileum was placed in formalin for 24 hours and then transferred to 70% ethanol for subsequent histological evaluation. The Peyer's patches were collected from the small intestine, and were flash-frozen in liquid nitrogen. The colon was rinsed, measured, weighed, and then trimmed to 6-cm in length and divided into 5 pieces as described in the above Examples. The most proximal 1-cm of colon was separately weighed, and flash-frozen for subsequent bioanalysis (PK) of test article levels. Of the remaining 5-cm of colon, the most distal and proximal 1.5-cm sections were each placed in formalin for 24 hours and then transferred to 70% ethanol for subsequent histological evaluation. The middle 2-cm portion was bisected longitudinally, and each piece was weighed, placed into two separate cryotubes, and snap frozen in liquid nitrogen; one of the samples was used for cytokine analysis and the other was used for myeloperoxidase (MPO) analysis. All plasma and frozen colon tissue samples were stored at −80° C. until used for endpoint analysis.

[2095] A more detailed description of the protocols used in this study are described below.

### Cecal Cannulation

[2096] Animals were placed under isoflurane anesthesia, and the cecum was exposed via a mid-line incision in the abdomen. A small point incision was made in the distal cecum through which 1-2 cm of the cannula was inserted. The incision was closed with a purse-string suture using 5-0 silk. An incision was made in the left abdominal wall through which the distal end of the cannula was inserted and pushed subcutaneously to the dorsal aspect of the back. The site was washed copiously with warmed saline prior to closing the abdominal wall. A small incision was made in the skin of the back between the shoulder blades, exposing the tip of the cannula. The cannula was secured in place using suture, wound clips, and tissue glue. All of the animals received 1 mL of warm sterile saline (subcutaneous injection) and were monitored closely until fully recovered before returning to the cage. All animals received buprenorphine at 0.6 mg/kg BID for the first 3 days, and Baytril at 10 mg/Kg QD for the first 5 days following surgery.

### Disease Induction

[2097] Colitis was induced on Day 0 in male RAG2^{-/-} mice by IP injection (200 μL) of 0.5×10⁶ CD44⁻/CD62L⁺ T cells (in PBS) isolated and purified from C57Bl/6 recipients.

### Donor Cell Harvest

[2098] Whole spleens were excised from C57Bl/6 mice and immediately placed in ice-cold PBS. The spleens were dissociated to yield a single cell suspension and the red blood cells were lysed. The spleens were then processed for CD4⁺ enrichment prior to CD44⁻CD62L⁺ sorting by MACS.

### Dosing

[2099] Treatment with test article was initiated on Day 0 and continued until Day 42 as outlined in Table 18. The animals in Groups 1 and 9 (n=8 per group; naive control) were not treated with test article. The animals in Group 2 were treated IP with vehicle (PBS) 3×/week and IC with vehicle QD. The animals in Group 3 were treated IP with IgG control 3×/week and IC with vehicle (PBS) QD. The animals in Group 4 were treated IP with vehicle (PBS) 3×/week and IC with IgG control QD. The animals in Group 5 were treated IP with anti-IL12 p40 antibody 3×/week and IC with vehicle QD. The animals in Group 6 were treated IP with vehicle 3×/week and IC with anti-IL12 p40 antibody QD. The animals in Group 7 were treated IP with anti-TNFα antibody 3×/week and IC with vehicle QD. The animals in Group 8 were treated IP with vehicle 3×/week and IC with anti-TNFα antibody QD.

### Body Weight and Survival

[2100] The animals were observed daily (weight, morbidity, survival, presence of diarrhea and/or bloody stool) in order to assess possible differences among treatment groups and/or possible toxicity resulting from the treatments.

### Animals Found Dead or Moribund

[2101] The animals were monitored on a daily basis and those exhibiting weight loss greater than 30% were euthanized, and did not have samples collected.

### Endoscopy

[2102] Each mouse underwent video endoscopy on Days 14 (pre-dosing; baseline), 28, and 42 (before euthanasia) using a small animal endoscope (Karl Storz Endoskope, Germany), under isoflurane anesthesia. During each endoscopic procedure, still images as well as video were recorded to evaluate the extent of colitis and the response to treatment. Additionally, an image from each animal at the most severe region of disease identified during endoscopy was captured. Colitis severity was scored using a 0-4 scale (0=normal; 1=loss of vascularity; 2=loss of vascularity and friability; 3=friability and erosions; 4=ulcerations and bleeding). Additionally, stool consistency was scored during endoscopy using the scoring system described herein.

### Sacrifice

[2103] All animals were euthanized by CO₂ inhalation following endoscopy on Day 42 and three hours after test-article dosing.

### Sample Collection

[2104] Terminal blood (plasma and cell pellet), Peyer's patches (Groups 1-8 only), small intestine and colon mLN (Groups 1-8 only), cecum contents, colon contents, small intestine, and colon were collected at euthanasia, as follows.

### Blood

[2105] Terminal blood was collected by cardiac puncture and plasma generated from these samples. The resulting plasma was split into two separate cryotubes with 50 μL in one tube (Bioanalysis), and the remainder in a second tube (TBD).

### Mesenteric Lymph Nodes

[2106] The mesenteric lymph nodes were collected, weighed, snap-frozen in liquid nitrogen, and stored at −80° C.

### Small Intestine

[2107] The small intestine was excised and rinsed, and the most distal 2-cm of ileum will be placed in formalin for 24 hours and then transferred to 70% ethanol for subsequent histological evaluation.

### Peyer's Patches

[2108] The Peyer's patches were collected from the small intestine. The collected Peyer's patches were weighed, snap-frozen in liquid nitrogen, and stored at −80° C.

### Cecum/Colon Contents

[2109] The cecum and colon were removed from each animal and contents collected, weighed, and snap-frozen in separate cryovials.

### Colon

[2110] Each colon was rinsed, measured, weighed, and then trimmed to 6-cm in length and divided into 5 pieces as outlined herein. The most proximal 1-cm of colon was separately weighed, and snap frozen for subsequent bioanalysis (PK) of test article levels. Of the remaining 5-cm of colon, the most distal and proximal 1.5-cm sections were placed in formalin for 24 hours and then transferred to 70% ethanol for subsequent histological evaluation. The middle 2-cm portion was bisected longitudinally, and each piece weighed, placed into two separate cryotubes, and snap-frozen in liquid nitrogen; one of these samples was used for cytokine analysis and the other sample was used for MPO analysis.

### Cytokine Levels in Colon Tissue

[2111] Cytokine levels (IFNγ, IL-2, IL-4, IL-5, IL-1β, IL-6, IL-12 p40, and TNFα) were assessed in colon tissue homogenate (all groups) by multiplex analysis. MPO levels were assessed by ELISA in colon tissue homogenate (all groups).

### Results

[2112] The Disease Activity Index was determined in each mouse using a total score from the scoring system depicted below.

| Disease Activity Index | Description | Score |
|---|---|---|
| Colitis Severity | Normal | 0 |
| | loss of vascularity | 1 |
| | loss of vascularity and friability | 2 |
| | friability and erosions | 3 |
| | ulcerations and bleeding | 4 |
| Stool Consistency | Normal | 0 |
| | Loose stool, soft, staying in shape | 1 |
| | abnormal form with excess moisture | 2 |
| | Watery or diarrhea | 3 |
| | Bloody diarrhea | 4 |
| Body Weight Loss (%) | X < 0% or gain weight | 0 |
| | 2% ≤ X < 5% | 1 |
| | 5% ≤ X < 10% | 2 |
| | 10% ≤ X < 15% | 3 |
| | 15% ≤ X < 20% | 4 |
| | 20% ≤ X < 25% | 5 |
| | 25% ≤ X < 30% | 6 |
| | X ≥ 35% | 7 |
| Total Score | | 15 |

[2113] The data in FIG. 103 show that mice intracecally administered anti-TNFα antibody (Group 8) had decreased disease activity index (DAI) as compared to mice intraperitoneally administered anti-TNF antibody (Group 7) at Day 42 of the study. The data in FIG. 104 show that mice intracecally administered anti-TNFα antibody (Group 8) had decreased levels of TNFα, IL-17A, and IL-4 in colonic tissue as compared to the levels in colonic tissue intraperitoneally administered anti-TNFα antibody (Group 7), when assessed at Day 42 of the study. The data in FIG. 105 show that mice intracecally administered anti-IL12 p40 antibody (Group 6) had decreased disease activity index (DAI) as compared to mice intraperitoneally administered anti-L12 p40 antibody (Group 5) at Day 28 and Day 42 of the study. The data in FIG. 106 show that mice intracecally administered anti-IL12 p40 antibody (Group 6) had decreased levels of IFN-gamma, IL-6, IL-17A, TNFα, IL-22, and IL-1b in colonic tissue as compared to the levels in colonic tissue in vehicle-administered control mice (Group 2).

### Exemplary Embodiments

[2114] 1. A method of treating an an inflammatory disease or condition that arises in a tissue originating from the endoderm in a subject, comprising:

[2115] administering to the subject a pharmaceutical formulation that comprises an immune modulator,

wherein the pharmaceutical formulation is released at a location in the gastrointestinal tract of the subject.
[2116] 2. The method of embodiment 1, wherein the pharmaceutical formulation is administered in an ingestible device.
[2117] 3. The method of embodiment 1, wherein the pharmaceutical formulation is released from an ingestible device.
[2118] 4. The method of embodiment 2 or 3, wherein the ingestible device comprises a housing, a reservoir containing the pharmaceutical formulation, and a release mechanism for releasing the pharmaceutical formulation from the device, wherein the reservoir is releasably or permanently attached to the exterior of the housing or internal to the housing.
[2119] 5. The method of embodiment 2 or 3, wherein the ingestible device comprises a housing, a reservoir containing the pharmaceutical formulation, and a release mechanism for releasing the pharmaceutical formulation from the device, wherein the reservoir is internal to the device.
[2120] 6. A method of treating a disease of the gastrointestinal tract in a subject, comprising:

[2121] administering to the subject an ingestible device comprising a housing, a reservoir containing a pharmaceutical formulation, and a release mechanism for releasing the pharmaceutical formulation from the device;

[2122] wherein the reservoir is releasably or permanently attached to the exterior of the housing or internal to the housing;

[2123] wherein the pharmaceutical formulation comprises an immune modulator, and

[2124] the ingestible device releases the pharmaceutical formulation at a location in the gastrointestinal tract of the subject that is proximate to one or more sites of disease.
[2125] 7. A method of treating a disease of the gastrointestinal tract in a subject, comprising:

[2126] administering to the subject an ingestible device comprising a housing, a reservoir containing a pharmaceutical formulation, and a release mechanism for releasing the pharmaceutical formulation from the device;

[2127] wherein the reservoir is internal to the device;

[2128] wherein the pharmaceutical formulation comprises an immune modulator, and

[2129] the ingestible device releases the pharmaceutical formulation at a location in the gastrointestinal tract of the subject that is proximate to one or more sites of disease.
[2130] 8. The method of any one of embodiments 4 to 7, wherein the housing is non-biodegradable in the GI tract.
[2131] 9. The method of any one of embodiments 2 to 8, wherein the release of the formulation is triggered autonomously.
[2132] 10. The method of any one of embodiments 2 to 9, wherein the device is programmed to release the formulation with one or more release profiles that may be the same or different at one or more locations in the GI tract.
[2133] 11. The method of any one of embodiments 2 to 10, wherein the device is programmed to release the formulation at a location proximate to one or more sites of disease.
[2134] 12. The method of embodiment 11, wherein the location of one or more sites of disease is predetermined.
[2135] 13. The method of any one of embodiments 4 to 12, wherein the reservoir is made of a material that allows the formulation to leave the reservoir
[2136] 14. The method of embodiment 13, wherein the material is a biodegradable material.
[2137] 15. The method of any one of embodiments 2 to 14, wherein the release of the formulation is triggered by a pre-programmed algorithm.
[2138] 16. The method of any one of embodiments 2 to 15, wherein the release of the formulation is triggered by data from a sensor or detector to identify the location of the device.
[2139] 17. The method of embodiment 16, wherein the data is not based solely on a physiological parameter.
[2140] 18. The method of any one of embodiments 2 to 17, wherein the device comprises a detector configured to detect light reflectance from an environment external to the housing.
[2141] 19. The method of embodiment 18, wherein the release is triggered autonomously or based on the detected reflectance.
[2142] 20. The method of any one of embodiments 2 to 19, wherein the device releases the formulation at substantially the same time as one or more sites of disease are detected.
[2143] 21. The method of any one of embodiments 4 to 20, wherein the release mechanism is an actuation system.
[2144] 22. The method of embodiment 21, wherein the actuation system is a chemical actuation system.
[2145] 23. The method of embodiment 21, wherein the actuation system is a mechanical actuation system.
[2146] 24. The method of embodiment 21, wherein the actuation system is an electrical actuation system.
[2147] 25. The method of embodiment 21, wherein the actuation system comprises a pump and releasing the formulation comprises pumping the formulation out of the reservoir.
[2148] 26. The method of embodiment 21, wherein the actuation system comprises a gas generating cell.
[2149] 27. The method of any one of embodiments 2 to 26, wherein the device comprises an anchoring mechanism.
[2150] 28. The method of any one of embodiments 1 to 27, wherein the formulation comprises a therapeutically effective amount of the immune modulator.
[2151] 29. The method of any one of the preceding embodiments, wherein the formulation comprises a human equivalent dose (HED) of the immune modulator

1.-229. (canceled)

230. A method of treating an inflammatory disease or condition that arises in a tissue originating from the endoderm in a subject in need thereof, the method comprising using an ingestible device to administer to the subject a pharmaceutical composition comprising a therapeutically effective amount of an immune modulator, wherein the pharmaceutical composition is released from the ingestible device in the small intestine or large intestine of the subject, thereby delivering the immune modulator to a location in the GI tract of the subject.

231. The method of claim 230, wherein the pharmacodynamic effects from releasing the immune modulator to the small intestine or large intestine of the subject are observed in one or more tissues proximal to the site of release.

232. The method of claim 231, wherein the pharmacodynamic effects are observed in one or more of the mesenteric lymph nodes (MSN) or the organs and tissues that drain into the MSN.

233. The method of claim 230, wherein the release of the pharmaceutical composition to the small intestine or large intestine provides one or more pharmacodynamic effects selected from: (i) suppression of a local inflammatory response and (ii) maintaining the systemic immune response.

234. The method of claim 233, wherein the release of the pharmaceutical composition to the small intestine or large intestine results in (i) a decrease in one or both of the level of T cells in a mesenteric lymph node and the level of T cells in a Peyer's patch in the subject, and/or (ii) an increase in the level of T cells in the blood of the subject; each as compared to the corresponding level in a subject administered the same amount of the immune modulator subcutaneously or intravenously.

235. The method of claim 234, wherein the level of T cells in the mesenteric lymph node is the level of Th memory cells in the mesenteric lymph node.

236. The method of claim 234, wherein the level of T cells in the Peyer's patch is the level of Th memory cells in the Peyer's patch.

237. The method of claim 234, wherein the level of T cells in the blood is the level of Th memory cells in the blood.

238. The method of claim 230, wherein the therapeutically effective amount of the immune modulator administered via the ingestible device is less than an amount that is effective when the immune modulator is administered subcutaneously or intravenously.

239. The method of claim 230, wherein the release of the pharmaceutical composition from the ingestible device comprises topical delivery of the immune modulator.

240. The method of claim 230, wherein releasing the pharmaceutical composition from the ingestible device is triggered by one or more of: a pH in the jejunum from 6.1 to 7.2, a pH in the mid small bowel from 7.0 to 7.8, a pH in the ileum from 7.0 to 8.0, a pH in the right colon from 5.7 to 7.0, a pH in the mid colon from 5.7 to 7.4, a pH in the left colon from 6.3 to 7.7, such as 7.0.

241. The method of claim 230, wherein the pharmaceutical composition is released as a bolus.

242. The method of claim 230, wherein the tissue originating from the endoderm is selected from the group consisting of the stomach, the colon, the liver, the pancreas, the urinary bladder, the epithelial parts of the trachea, the lungs, the pharynx, the thyroid, the parathyroid, the intestines, and the gallbladder.

243. The method of claim 230, wherein the tissue originating from the endoderm is selected from the group consisting of the liver, the pancreas, the intestines, and the gallbladder.

244. The method of claim 230, wherein the inflammatory disease or condition is selected from the group consisting of gastritis, Celiac disease, hepatitis, alcoholic lever disease, fatty liver disease (hepatic steatosis), non-alcoholic fatty liver disease (NASH), cirrhosis, primary sclerosing cholangitis, pancreatitis, interstitial cystitis, asthma, chronic obstructive pulmonary disease, pulmonary fibrosis, pharyngitis, thyroiditis, hyperthyroidism, parathyroiditis, nephritis, Hashimoto's disease, Addison's disease, Graves' disease, Sjögren syndrome, type 1 diabetes, pelvic inflammatory disease, auditory canal inflammation, tinnitus, vestibular neuritis, otitis media, auditory canal inflammation, tracheitis, cholestatic liver disease, primary biliary sclerosis, liver parenchyma, an inherited metabolic disorder of the liver, Byler syndrome, cerebrotendinous, xanthomatosis, Zellweger's syndrome, neonatal hepatitis, cystic fibrosis, ALGS (Alagille syndrome), PFIC (progressive familial intrahepatic cholestasis), autoimmune hepatitis, primary biliary cirrhosis (PBC), liver fibrosis, NAFLD, portal hypertension, general cholestasis, intra- and extrahepatic cholestasis, hereditary forms of cholestasis, PFIC1, gall stones, choledocholithiasis, malignancy causing obstruction of the biliary tree, scratching and/or pruritus due to cholestasis/jaundice, chronic autoimmune liver disease leading to progressive cholestasis, and pruritus of cholestatic liver disease, duodenal ulcers, enteritis (radiation-, chemotherapy-, or infection-induced enteritis), diverticulitis, pouchitis, cholecystitis, and cholangitis.

245. The method of claim 230, wherein the inflammatory disease or condition is inflammation of the liver.

246. The method of claim 230, wherein the immune modulator is an integrin inhibitor.

247. The method of claim 246, wherein the integrin inhibitor is selected from the group consisting of an inhibitory nucleic acid, a fusion protein, an integrin antagonist, a cyclic peptide, a disintegrin, a peptidomimetic, a small molecule, and an antibody or antigen-binding fragment thereof.

248. The method of claim 246, wherein the integrin inhibitor is an antibody, an antigen-binding fragment, or a biosimilar thereof.

249. The method of claim 246, wherein the integrin inhibitor is a fusion protein or a biosimilar thereof.

250. The method of claim 246, wherein the integrin inhibitor is a peptidomimetic.

251. The method of claim 246, wherein the integrin inhibitor is selected from the group consisting of an α1β1 integrin inhibitor, an α2β1 integrin inhibitor, an αIIbβ3 integrin inhibitor, an α4β1 (VLA-4) integrin inhibitor, an α4β7 integrin inhibitor, an α5β1 integrin inhibitor, an α5β3 integrin inhibitor, an α5β5 integrin inhibitor, an α5β6 integrin inhibitor, an E-selectin inhibitor, an ICAM-1 inhibitor, and a MAdCAM-1 inhibitor.

252. The method of claim 251, wherein the integrin inhibitor is an α4β7 integrin inhibitor.

253. The method of claim 252, wherein the α4β7 integrin inhibitor is selected from the group consisting of AJM300, vedolizumab, natalizumab and etrolizumab; and generic equivalents thereof.

254. The method of claim 252, wherein the α4β7 integrin inhibitor is vedolizumab, or a generic equivalent thereof.

255. The method of claim 230, wherein the ingestible device comprises an opening, and the method comprises delivering the immune modulator from the ingestible device via the opening.

256. The method of claim 255, wherein the opening comprises a nozzle.

257. The method of claim 256, wherein the ingestible device directly delivers the immune modulator to the GI tract of the subject via topical delivery.

258. The method of claim 256, wherein the ingestible device directly delivers the immune modulator to the GI tract of the subject via epithelial delivery.

259. The method of claim 256, wherein the ingestible device directly delivers the immune modulator to the GI tract of the subject via trans-epithelial delivery.

The application's sequence listing, which the Patent Office published only in electronic form, follows.

SEQUENCE LISTING (210 sequences)

SEQ ID NO: 1 - DNA, 1450 bp, Homo sapiens
tttcgctttcattttgggccgagctggaggcggcggggccgtcccggaacggctgcggccgggcaccccgggagttaatccgaaagcgccgcaagccccgcgggccggccgcaccgcacgtgtcaccgagaagctgatgtagagagagacacagaaggagacagaaagcaagagaccagagtcccgggaaagtcctgccgcgcctcgggacaattataaaaatgtggccccctgggtcagcctcccagccaccgccctcacctgccgcggccacaggtctgcatccagcggctcgccctgtgtccctgcagtgccggctcagcatgtgtccagcgcgcagcctcctccttgtggctaccctggtcctcctggaccacctcagtttggccagaaacctccccgtggccactccagacccaggaatgttcccatgccttcaccactcccaaaacctgctgagggccgtcagcaacatgctccagaaggccagacaaactctagaattttacccttgcacttctgaagagattgatcatgaagatatcacaaaagataaaaccagcacagtggaggcctgtttaccattggaattaaccaagaatgagagttgcctaaattccagagagacctctttcataactaatgggagttgcctggcctccagaaagacctcttttatgatggccctgtgccttagtagtatttatgaagacttgaagatgtaccaggtggagttcaagaccatgaatgcaaagcttctgatggatcctaagaggcagatctttctagatcaaaacatgctggcagttattgatgagctgatgcaggccctgaatttcaacagtgagactgtgccacaaaaatcctcccttgaagaaccggatttttataaaactaaaatcaagctctgcatacttcttcatgctttcagaattcgggcagtgactattgatagagtgatgagctatctgaatgcttcctaaaaagcgaggtccctccaaaccgttgtcatttttataaaactttgaaatgaggaaactttgataggatgtggattaagaactagggagggggaaagaaggatgggactattacatccacatgatacctctgatcaagtatttttgacatttactgtggataaattgtttttaagttttcatgaatgaattgctaagaagggaaaatatccatcctgaaggtgtttttcattcactttaatagaagggcaaatatttataagctatttctgtaccaaagtgtttgtggaaacaaacatgtaagcataacttattttaaaatatttatttatataacttggtaatcatgaaagcatctgagctaacttatatttatttatgttatatttattaaattatttatcaagtgtatttgaaaaatatttttaagtgttctaaaaataaaagtattgaattaaagtgaaaaaaaa

SEQ ID NO: 2 - DNA, 2287 bp, Homo sapiens
gtcatctcttggttttccctggtttttctggcatctcccctcgtggccatatgggaactgaagaaagatgtttatgtcgtagaattggattggtatccggatgcccctggagaaatggtggtcctcacctgtgacacccctgaagaagatggtatcacctggaccttggaccagagcagtgaggtcttaggctctggcaaaaccctgaccatccaagtcaaagagtttggagatgctggccagtacacctgtcacaaaggaggcgaggttctaagccattcgctcctgctgcttcacaaaaaggaagatggaatttggtccactgatattttaaaggaccagaaagaacccaaaaataagacctttctaagatgcgaggccaagaattattctggacgtttcacctgctggtggctgacgacaatcagtactgatttgacattcagtgtcaaaagcagcagaggctcttctgacccccaaggggtgacgtgcggagctgctacactctctgcagagagagtcagaggggacaacaaggagtatgagtactcagtggagtgccaggaggacagtgcctgcccagctgctgaggagagtctgcccattgaggtcatggtggatgccgttcacaagctcaagtatgaaaactacaccagcagcttcttcatcagggacatcatcaaacctgacccacccaagaacttgcagctgaagccattaaagaattctcggcaggtggaggtcagctgggagtaccctgacacctggagtactccacattcctacttctccctgacattctgcgttcaggtccagggcaagagcaagagagaaaagaaagatagagtcttcacggacaagacctcagccacggtcatctgccgcaaaaatgccagcattagcgtgcgggcccaggaccgctactatagctcatcttggagcgaatgggcatctgtgccctgcagttaggttctgatccaggatgaaaatttggaggaaaagtggaagatattaagcaaaatgtttaaagacacaacggaatagacccaaaaagataatttctatctgatttgctttaaaacgtttttttaggatcacaatgatatctttgctgtatttgtatagttagatgctaaatgctcattgaaacaatcagctaatttatgtatagattttccagctctcaagttgccatgggccttcatgctatttaaatatttaagtaatttatgtatttattagtatattactgttatttaacgtttgtctgccaggatgtatggaatgtttcatactcttatgacctgatccatcaggatcagtccctattatgcaaaatgtgaatttaattttatttgtactgacaacttttcaagcaaggctgcaagtacatcagttttatgacaatcaggaagaatgcagtgttctgataccagtgccatcatacacttgtgatggatgggaacgcaagagatacttacatggaaacctgacaatgcaaacctgttgagaagatccaggagaacaagatgctagttcccatgtctgtgaagacttcctggagatggtgttgataaagcaatttagggccacttacacttctaagcaagtttaatctttggatgcctgaattttaaaagggctagaaaaaaatgattgaccagcctgggaaacataacaagaccccgtctctacaaaaaaaatttaaaattagccaggcgtggtggctcatgcttgtggtcccagctgttcaggaggatgaggcaggaggatctcttgagcccaggaggtcaaggctatggtgagccgtgattgtgccactgcataccagcctaggtgacagaatgagaccctgtctcaaaaaaaaaaatgattgaaattaaaattcagctttagcttccatggcagtcctcacccccacctctctaaaagacacaggaggatgacacagaaacaccgtaagtgtctggaaggcaaaaagatcttaagattcaagagagaggacaagtagttatggctaaggacatgaaattgtcagaatggcaggtggcttcttaacagccctgtgagaagcagacagatgcaaagaaaatctggaatccctttctcattagcatgaatgaacctgatacacaattatgaccagaaaatatggctccatgaaggtgctacttttaagtaatgtatgtgcgctctgtaaagtgattacatttgtttcctgtttgtttatttatttatttatttttgcattctgaggctgaactaataaaaactcttctttgtaatc

SEQ ID NO: 3 - DNA, 1049 bp, Homo sapiens
aaaacaacaggaagcagcttacaaactcggtgaacaactgagggaaccaaaccagagacgcgctgaacagagagaatcaggctcaaagcaagtggaagtgggcagagattccaccaggactggtgcaaggcgcagagccagccagatttgagaagaaggcaaaaagatgctggggagcagagctgtaatgctgctgttgctgctgccctggacagctcagggcagagctgtgcctgggggcagcagccctgcctggactcagtgccagcagctttcacagaagctctgcacactggcctggagtgcacatccactagtgggacacatggatctaagagaagagggagatgaagagactacaaatgatgttccccatatccagtgtggagatggctgtgacccccaaggactcagggacaacagtcagttctgcttgcaaaggatccaccagggtctgattttttatgagaagctgctaggatcggatattttcacaggggagccttctctgctccctgatagccctgtgggccagcttcatgcctccctactgggcctcagccaactcctgcagcctgagggtcaccactgggagactcagcagattccaagcctcagtcccagccagccatggcagcgtctccttctccgcttcaaaatccttcgcagcctccaggcctttgtggctgtagccgcccgggtctttgcccatggagcagcaaccctgagtccctaaaggcagcagctcaaggatggcactcagatctccatggcccagcaaggccaagataaatctaccaccccaggcacctgtgagccaacaggttaattagtccattaattttagtgggacctgcatatgttgaaaattaccaatactgactgacatgtgatgctgacctatgataaggttgagtatttattagatgggaagggaaatttggggattatttatcctcctggggacagtttggggaggattatttattgtatttatattgaattatgtacttttttcaataaagtcttatttttgtggctaaaaaaaa

SEQ ID NO: 4 - DNA, 2800 bp, Homo sapiens
ctctttcactttgacttgccttagggatgggctgtgacactttactttttttcttttttcttttttttcagtcttttctccttgctcagcttcaatgtgttccggagtggggacggggtggctgaacctcgcaggtggcagagaggctcccctggggctgtggggctctacgtggatccgatggagccgctggtgacctgggtggtccccctcctcttcctcttcctgctgtccaggcagggcgctgcctgcagaaccagtgagtgctgttttcaggacccgccatatccggatgcagactcaggctcggcctcgggccctagggacctgagatgctatcggatatccagtgatcgttacgagtgctcctggcagtatgagggtcccacagctggggtcagccacttcctgcggtgttgccttagctccgggcgctgctgctacttcgccgccggctcagccaccaggctgcagttctccgaccaggctggggtgtctgtgctgtacactgtcacactctgggtggaatcctgggccaggaaccagacagagaagtctcctgaggtgaccctgcagctctacaactcagttaaatatgagcctcctctgggagacatcaaggtgtccaagttggccgggcagctgcgtatggagtgggagaccccggataaccaggttggtgctgaggtgcagttccggcaccggacacccagcagcccatggaagttgggcgactgcggacctcaggatgatgatactgagtcctgcctctgccccctggagatgaatgtggcccaggaattccagctccgacgacggcagctggggagccaaggaagttcctggagcaagtggagcagccccgtgtgcgttccccctgaaaaccccccacagcctcaggtgagattctcggtggagcagctgggccaggatgggaggaggcggctgaccctgaaagagcagccaacccagctggagcttccagaaggctgtcaagggctggcgcctggcacggaggtcacttaccgactacagctccacatgctgtcctgcccgtgtaaggccaaggccaccaggaccctgcacctggggaagatgccctatctctcgggtgctgcctacaacgtggctgtcatctcctcgaaccaatttggtcctggcctgaaccagacgtggcacattcctgccgacacccacacagaaccagtggctctgaatatcagcgtcggaaccaacgggaccaccatgtattggccagcccgggctcagagcatgacgtattgcattgaatggcagcctgtgggccaggacgggggccttgccacctgcagcctgactgcgccgcaagacccggatccggctggaatggcaacctacagctggagtcgagagtctggggcaatggggcaggaaaagtgttactacattaccatctttgcctctgcgcaccccgagaagctcaccttgtggtctacggtcctgtccacctaccactttgggggcaatgcctcagcagctgggacaccgcaccacgtctcggtgaagaatcatagcttggactctgtgtctgtggactgggcaccatccctgctgagcacctgtcccggcgtcctaaaggagtatgttgtccgctgccgagatgaagacagcaaacaggtgtcagagcatcccgtgcagcccacagagacccaagttaccctcagtggcctgcgggctggtgtagcctacacggtgcaggtgcgagcagacacagcgtggctgaggggtgtctggagccagccccagcgcttcagcatcgaagtgcaggtttctgattggctcatcttcttcgcctccctggggagcttcctgagcatccttctcgtgggcgtccttggctaccttggcctgaacagggccgcacggcacctgtgcccgccgctgcccacaccctgtgccagctccgccattgagttccctggagggaaggagacttggcagtggatcaacccagtggacttccaggaagaggcatccctgcaggaggccctggtggtagagatgtcctgggacaaaggcgagaggactgagcctctcgagaagacagagctacctgagggtgcccctgagctggccctggatacagagttgtccttggaggatggagacaggtgcaaggccaagatgtgatcgttgaggctcagagagggtgagtgactcgcccgaggctacgtagcacacacaggagtcacatttggacccaaataacccagagctcctccaggctccagtgcacctgcctcctctctgccccgtgcctgttgccacccatcctgcgggggaaccctagatgctgccatgaaatggaagctgctgcaccctgctgggcctggcatccgtggggcaggagcagaccctgccatttacctgttctggcgtagaatggactgggaatgggggcaaggggggctcagatggatccctggaccctgggctgggcatccacccccaggagcactggatggggagtctggactcaagggctccctgcagcattgcggggtcttgtagcttggaggatccaggcatatagggaagggggctgtaaactttgtgggaaaaatgacggtcctcccatcccaccccccaccccaccctcacccccctataaaatgggggtggtgataatgaccttacacagctgttcaaaatcatcgtaaatgagcctcctcttgggtatttttttcctgtttgaagcttgaatgtcctgctcaaaatctcaaaacacgagccttggaattcaaaaaaaaaaaaaaaaaaa

SEQ ID NO: 5 - DNA, 1997 bp, Homo sapiens
ctctttcactttgacttgccttagggatgggctgtgacactttactttttttcttttttcttttttttcagtcttttctccttgctcagcttcaatgtgttccggagtggggacggggtggctgaacctcgcaggtggcagagaggctcccctggggctgtggggctctacgtggatccgatggagccgctggtgacctgggtggtccccctcctcttcctcttcctgctgtccaggcagggcgctgcctgcagaaccagtgagtgctgttttcaggacccgccatatccggatgcagactcaggctcggcctcgggccctagggacctgagatgctatcggatatccagtgatcgttacgagtgctcctggcagtatgagggtcccacagctggggtcagccacttcctgcggtgttgccttagctccgggcgctgctgctacttcgccgccggctcagccaccaggctgcagttctccgaccaggctggggtgtctgtgctgtacactgtcacactctgggtggaatcctgggccaggaaccagacagagaagtctcctgaggtgaccctgcagctctacaactcagttaaatatgagcctcctctgggagacatcaaggtgtccaagttggccgggcagctgcgtatggagtgggagaccccggataaccaggttggtgctgaggtgcagttccggcaccggacacccagcagcccatggaagttgggcgactgcggacctcaggatgatgatactgagtcctgcctctgccccctggagatgaatgtggcccaggaattccagctccgacgacggcagctggggagccaaggaagttcctggagcaagtggagcagccccgtgtgcgttccccctgaaaaccccccacagcctcaggtgagattctcggtggagcagctgggccaggatgggaggaggcggctgaccctgaaagagcagccaacccagctggagcttccagaaggctgtcaagggctggcgcctggcacggaggtcacttaccgactacagctccacatgctgtcctgcccgtgtaaggccaaggccaccaggaccctgcacctggggaagatgccctatctctcgggtgctgcctacaacgtggctgtcatctcctcgaaccaatttggtcctggcctgaaccagacgtggcacattcctgccgacacccacacagatggcatgatctcagctcactgcaacctccgccttccagattcaagagattctcctgcttcagcctcccgagtagctgggattacaggcatctgccaccatacccggctaattttgtatttttagtagagacggggtttcaccacgttggccaggctggtctcgaactcctgacctcaagtgatccacctgccttggcctcccaaagtgttgggattataggcgtgagccaccatgcccagcctaatttttgtatttttagtagagatggagtttcaccatgttgcccaggctggtctcaaactcctgccctcaggtgatccacccacctcagcctctcaaagtgctgggattacaggtgtgagccactgtggccgacctactatttttattatttttgagctaggttctcagtctgttggcagactggagtgcaatcatggctcactgcagccttgaactcccagactcaagtgatccttccacctcagcctctggagtagctgggactacagacatgcaccaccacacctggttaattttttatttttattttttgtagagacaggtgtctctctacgttgcccaggctggtctcgaactcctgggctcaagtgatccacccatctccacctcccaaagtgctaggattacaggcgtgagccaccgtacccagcctggtcccatatcatagtgaaatggtgcctgtaaagctctcagcattggcttggcacatgcagttggtactcaataaacggctgttgctatccccaaaaaaaaaaaaaaaaaaaaaaaaa

SEQ ID NO: 6 - DNA, 2787 bp, Homo sapiens
ctctttcactttgacttgccttagggatgggctgtgacactttactttttttcttttttcttttttttcagtcttttctccttgctcagcttcaatgtgttccggagtggggacggggtggctgaacctcgcaggtggcagagaggctcccctggggctgtggggctctacgtggatccgatggagccgctggtgacctgggtggtccccctcctcttcctcttcctgctgtccaggcagggcgctgcctgcagaaccagtgagtgctgttttcaggacccgccatatccggatgcagactcaggctcggcctcgggccctagggacctgagatgctatcggatatccagtgatcgttacgagtgctcctggcagtatgagggtcccacagctggggtcagccacttcctgcggtgttgccttagctccgggcgctgctgctacttcgccgccggctcagccaccaggctgcagttctccgaccaggctggggtgtctgtgctgtacactgtcacactctgggtggaatcctgggccaggaaccagacagagaagtctcctgaggtgaccctgcagctctacaactcagttaaatatgagcctcctctgggagacatcaaggtgtccaagttggccgggcagctgcgtatggagtgggagaccccggataaccaggttggtgctgaggtgcagttccggcaccggacacccagcagcccatggaagttgggcgactgcggacctcaggatgatgatactgagtcctgcctctgccccctggagatgaatgtggcccaggaattccagctccgacgacggcagctggggagccaaggaagttcctggagcaagtggagcagccccgtgtgcgttccccctgaaaaccccccacagcctcaggtgagattctcggtggagcagctgggccaggatgggaggaggcggctgaccctgaaagagcagccaacccagctggagcttccagaaggctgtcaagggctggcgcctggcacggaggtcacttaccgactacagctccacatgctgtcctgcccgtgtaaggccaaggccaccaggaccctgcacctggggaagatgccctatctctcgggtgctgcctacaacgtggctgtcatctcctcgaaccaatttggtcctggcctgaaccagacgtggcacattcctgccgacacccacacagaaccagtggctctgaatatcagcgtcggaaccaacgggaccaccatgtattggccagcccgggctcagagcatgacgtattgcattgaatggcagcctgtgggccaggacgggggccttgccacctgcagcctgactgcgccgcaagacccggatccggctggaatggcaacctacagctggagtcgagagtctggggcaatggggcaggaaaagtgttactacattaccatctttgcctctgcgcaccccgagaagctcaccttgtggtctacggtcctgtccacctaccactttgggggcaatgcctcagcagctgggacaccgcaccacgtctcggtgaagaatcatagcttggactctgtgtctgtggactgggcaccatccctgctgagcacctgtcccggcgtcctaaaggagtatgttgtccgctgccgagatgaagacagcaaacaggtgtcagagcatcccgtgcagcccacagagacccaagttaccctcagtggcctgcgggctggtgtagcctacacggtgcaggtgcgagcagacacagcgtggctgaggggtgtctggagccagccccagcgcttcagcatcgaagtgcaggtttctgattggctcatcttcttcgcctccctggggagcttcctgagcatccttctcgtgggcgtccttggctaccttggcctgaacagggccgcacggcacctgtgcccgccgctgcccacaccctgtgccagctccgccattgagttccctggagggaaggagacttggcagtggatcaacccagtggacttccaggaagaggcatccctgcaggaggccctggtggtagagatgtcctgggacaaaggcgagaggactgagcctctcgagaagacagagctacctgagggtgcccctgagctggccctggatacagagttgtccttggaggatggagacagatgtgatcgttgaggctcagagagggtgagtgactcgcccgaggctacgtagcacacacaggagtcacatttggacccaaataacccagagctcctccaggctccagtgcacctgcctcctctctgccccgtgcctgttgccacccatcctgcgggggaaccctagatgctgccatgaaatggaagctgctgcaccctgctgggcctggcatccgtggggcaggagcagaccctgccatttacctgttctggcgtagaatggactgggaatgggggcaaggggggctcagatggatccctggaccctgggctgggcatccacccccaggagcactggatggggagtctggactcaagggctccctgcagcattgcggggtcttgtagcttggaggatccaggcatatagggaagggggctgtaaactttgtgggaaaaatgacggtcctcccatcccaccccccaccccaccctcacccccctataaaatgggggtggtgataatgaccttacacagctgttcaaaatcatcgtaaatgagcctcctcttgggtatttttttcctgtttgaagcttgaatgtcctgctcaaaatctcaaaacacgagccttggaattcaaaaaaaaaaaaaaaaaaa

SEQ ID NO: 7 - DNA, 2791 bp, Homo sapiens
agaacactccgctgcctctccagagccaggcacacagcaggcgctccataaatgttcgttggtcttttctccttgctcagcttcaatgtgttccggagtggggacggggtggctgaacctcgcaggtggcagagaggctcccctggggctgtggggctctacgtggatccgatggagccgctggtgacctgggtggtccccctcctcttcctcttcctgctgtccaggcagggcgctgcctgcagaaccagtgagtgctgttttcaggacccgccatatccggatgcagactcaggctcggcctcgggccctagggacctgagatgctatcggatatccagtgatcgttacgagtgctcctggcagtatgagggtcccacagctggggtcagccacttcctgcggtgttgccttagctccgggcgctgctgctacttcgccgccggctcagccaccaggctgcagttctccgaccaggctggggtgtctgtgctgtacactgtcacactctgggtggaatcctgggccaggaaccagacagagaagtctcctgaggtgaccctgcagctctacaactcagttaaatatgagcctcctctgggagacatcaaggtgtccaagttggccgggcagctgcgtatggagtgggagaccccggataaccaggttggtgctgaggtgcagttccggcaccggacacccagcagcccatggaagttgggcgactgcggacctcaggatgatgatactgagtcctgcctctgccccctggagatgaatgtggcccaggaattccagctccgacgacggcagctggggagccaaggaagttcctggagcaagtggagcagccccgtgtgcgttccccctgaaaaccccccacagcctcaggtgagattctcggtggagcagctgggccaggatgggaggaggcggctgaccctgaaagagcagccaacccagctggagcttccagaaggctgtcaagggctggcgcctggcacggaggtcacttaccgactacagctccacatgctgtcctgcccgtgtaaggccaaggccaccaggaccctgcacctggggaagatgccctatctctcgggtgctgcctacaacgtggctgtcatctcctcgaaccaatttggtcctggcctgaaccagacgtggcacattcctgccgacacccacacagaaccagtggctctgaatatcagcgtcggaaccaacgggaccaccatgtattggccagcccgggctcagagcatgacgtattgcattgaatggcagcctgtgggccaggacgggggccttgccacctgcagcctgactgcgccgcaagacccggatccggctggaatggcaacctacagctggagtcgagagtctggggcaatggggcaggaaaagtgttactacattaccatctttgcctctgcgcaccccgagaagctcaccttgtggtctacggtcctgtccacctaccactttgggggcaatgcctcagcagctgggacaccgcaccacgtctcggtgaagaatcatagcttggactctgtgtctgtggactgggcaccatccctgctgagcacctgtcccggcgtcctaaaggagtatgttgtccgctgccgagatgaagacagcaaacaggtgtcagagcatcccgtgcagcccacagagacccaagttaccctcagtggcctgcgggctggtgtagcctacacggtgcaggtgcgagcagacacagcgtggctgaggggtgtctggagccagccccagcgcttcagcatcgaagtgcaggtttctgattggctcatcttcttcgcctccctggggagcttcctgagcatccttctcgtgggcgtccttggctaccttggcctgaacagggccgcacggcacctgtgcccgccgctgcccacaccctgtgccagctccgccattgagttccctggagggaaggagacttggcagtggatcaacccagtggacttccaggaagaggcatccctgcaggaggccctggtggtagagatgtcctgggacaaaggcgagaggactgagcctctcgagaagacagagctacctgagggtgcccctgagctggccctggatacagagttgtccttggaggatggagacaggtgcaaggccaagatgtgatcgttgaggctcagagagggtgagtgactcgcccgaggctacgtagcacacacaggagtcacatttggacccaaataacccagagctcctccaggctccagtgcacctgcctcctctctgccccgtgcctgttgccacccatcctgcgggggaaccctagatgctgccatgaaatggaagctgctgcaccctgctgggcctggcatccgtggggcaggagcagaccctgccatttacctgttctggcgtagaatggactgggaatgggggcaaggggggctcagatggatccctggaccctgggctgggcatccacccccaggagcactggatggggagtctggactcaagggctccctgcagcattgcggggtcttgtagcttggaggatccaggcatatagggaagggggctgtaaactttgtgggaaaaatgacggtcctcccatcccaccccccaccccaccctcacccccctataaaatgggggtggtgataatgaccttacacagctgttcaaaatcatcgtaaatgagcctcctcttgggtatttttttcctgtttgaagcttgaatgtcctgctcaaaatctcaaaacacgagccttggaattcaaaaaaaaaaaaaaaaaaa

SEQ ID NO: 8 - DNA, 4040 bp, Homo sapiens
tgcagagcacagagaaaggacatctgcgaggaaagttccctgatggctgtcaacaaagtgccacgtctctatggctgtgaacgctgagcacacgattttatcgcgcctatcatatcttggtgcataaacgcacctcacctcggtcaacccttgctccgtcttatgagacaggctttattatccgcattttatatgaggggaaactgacggtggagagagaattatcttgctcaaggcgacacagcagagcccacaggtggcagaatcccacccgagcccgcttcgacccgcggggtggaaaccacgggcgcccgcccggctgcgcttccagagctgaactgagaagcgagtcctctccgccctgcggccaccgcccagccccgacccccgccccggcccgatcctcactcgccgccagctccccgcgcccaccccggagttggtggcgcagaggcgggaggcggaggcgggagggcgggcgctggcaccgggaacgcccgagcgccggcagagagcgcggagagcgcgacacgtgcggcccagagcaccggggccacccggtccccgcaggcccgggaccgcgcccgctggcaggcgacacgtggaagaatacggagttctataccagagttgattgttgatggcacatacttttagaggatgctcattggcatttatgtttataatcacgtggctgttgattaaagcaaaaatagatgcgtgcaagagaggcgatgtgactgtgaagccttcccatgtaattttacttggatccactgtcaatattacatgctctttgaagcccagacaaggctgctttcactattccagacgtaacaagttaatcctgtacaagtttgacagaagaatcaattttcaccatggccactccctcaattctcaagtcacaggtcttccccttggtacaaccttgtttgtctgcaaactggcctgtatcaatagtgatgaaattcaaatatgtggagcagagatcttcgttggtgttgctccagaacagcctcaaaatttatcctgcatacagaagggagaacaggggactgtggcctgcacctgggaaagaggacgagacacccacttatacactgagtatactctacagctaagtggaccaaaaaatttaacctggcagaagcaatgtaaagacatttattgtgactatttggactttggaatcaacctcacccctgaatcacctgaatccaatttcacagccaaggttactgctgtcaatagtcttggaagctcctcttcacttccatccacattcacattcttggacatagtgaggcctcttcctccgtgggacattagaatcaaatttcaaaaggcttctgtgagcagatgtaccctttattggagagatgagggactggtactgcttaatcgactcagatatcggcccagtaacagcaggctctggaatatggttaatgttacaaaggccaaaggaagacatgatttgctggatctgaaaccatttacagaatatgaatttcagatttcctctaagctacatctttataagggaagttggagtgattggagtgaatcattgagagcacaaacaccagaagaagagcctactgggatgttagatgtctggtacatgaaacggcacattgactacagtagacaacagatttctcttttctggaagaatctgagtgtctcagaggcaagaggaaaaattctccactatcaggtgaccttgcaggagctgacaggagggaaagccatgacacagaacatcacaggacacacctcctggaccacagtcattcctagaaccggaaattgggctgtggctgtgtctgcagcaaattcaaaaggcagttctctgcccactcgtattaacataatgaacctgtgtgaggcagggttgctggctcctcgccaggtctctgcaaactcagagggcatggacaacattctggtgacttggcagcctcccaggaaagatccctctgctgttcaggagtacgtggtggaatggagagagctccatccagggggtgacacacaggtccctctaaactggctacggagtcgaccctacaatgtgtctgctctgatttcagagaacataaaatcctacatctgttatgaaatccgtgtgtatgcactctcaggggatcaaggaggatgcagctccatcctgggtaactctaagcacaaagcaccactgagtggcccccacattaatgccatcacagaggaaaaggggagcattttaatttcatggaacagcattccagtccaggagcaaatgggctgcctcctccattataggatatactggaaggaacgggactccaactcccagcctcagctctgtgaaattccctacagagtctcccaaaattcacatccaataaacagcctgcagccccgagtgacatatgtcctgtggatgacagctctgacagctgctggtgaaagttcccacggaaatgagagggaattttgtctgcaaggtaaagccaattggatggcgtttgtggcaccaagcatttgcattgctatcatcatggtgggcattttctcaacgcattacttccagcaaaaggtgtttgttctcctagcagccctcagacctcagtggtgtagcagagaaattccagatccagcaaatagcacttgcgctaagaaatatcccattgcagaggagaagacacagctgcccttggacaggctcctgatagactggcccacgcctgaagatcctgaaccgctggtcatcagtgaagtccttcatcaagtgaccccagttttcagacatcccccctgctccaactggccacaaagggaaaaaggaatccaaggtcatcaggcctctgagaaagacatgatgcacagtgcctcaagcccaccacctccaagagctctccaagctgagagcagacaactggtggatctgtacaaggtgctggagagcaggggctccgacccaaagcccgaaaacccagcctgtccctggacggtgctcccagcaggtgaccttcccacccatgatggctacttaccctccaacatagatgacctcccctcacatgaggcacctctcgctgactctctggaagaactggagcctcagcacatctccctttctgttttcccctcaagttctcttcacccactcaccttctcctgtggtgataagctgactctggatcagttaaagatgaggtgtgactccctcatgctctgagtggtgaggcttcaagccttaaagtcagtgtgccctcaaccagcacagcctgccccaattcccccagcccctgctccagcagctgtcatctctgggtgccaccatcggtctggctgcagctagaggacaggcaagccagctctgggggagtcttaggaactgggagttggtcttcactcagatgcctcatcttgcctttcccagggccttaaaattacatccttcactgtgtggacctagagactccaacttgaattcctagtaactttcttggtatgctggccagaaagggaaatgaggaggagagtagaaaccacagctcttagtagtaatggcatacagtctagaggaccattcatgcaatgactatttctaaagcacctgctacacagcaggctgtacacagcagatcagtactgttcaacagaacttcctgagatgatggaaatgttctacctctgcactcactgtccagtacattagacactaggcacattggctgttaatcacttggaatgtgtttagcttgactgaggaattaaattttgattgtaaatttaaatcgccacacatggctagtggctactgtattggagtgcacagctctagatggctcctagattattgagagccttcaaaacaaatcaacctagttctatagatgaagacataaaagacactggtaaacaccaaggtaaaagggcccccaaggtggtcatgactggtctcatttgcagaagtctaagaatgtacctttttctggccgggcgtggtagctcatgcctgtaatcccagcactttgggaggctga

SEQ ID NO: 9 - DNA, 4028 bp, Homo sapiens
tgcagagcacagagaaaggacatctgcgaggaaagttccctgatggctgtcaacaaagtgccacgtctctatggctgtgaacgctgagcacacgattttatcgcgcctatcatatcttggtgcataaacgcacctcacctcggtcaacccttgctccgtcttatgagacaggctttattatccgcattttatatgaggggaaactgacggtggagagagaattatcttgctcaaggcgacacagcagagcccacaggtggcagaatcccacccgagcccgcttcgacccgcggggtggaaaccacgggcgcccgcccggctgcgcttccagagctgaactgagaagcgagtcctctccgccctgcggccaccgcccagccccgacccccgccccggcccgatcctcactcgccgccagctccccgcgcccaccccggagttggtggcgcagaggcgggaggcggaggcgggagggcgggcgctggcaccgggaacgcccgagcgccggcagagagcgcggagagcgcgacacgtgcggcccagagcaccggggccacccggtccccgcaggcccgggaccgcgcccgctggcaggcgacacgtggtcacggtgatccatttgtaaagtcgggaataaatgacctctgaagtgttgtctgtatattgatctgctaccagtaaaacatatctctgaagaatacggagttctataccagagttgattgttgatggcacatacttttagaggatgctcattggcatttatgtttataatcacgtggctgttgattaaagcaaaaatagatgcgtgcaagagaggcgatgtgactgtgaagccttcccatgtaattttacttggatccactgtcaatattacatgctctttgaagcccagacaaggctgctttcactattccagacgtaacaagttaatcctgtacaagtttgacagaagaatcaattttcaccatggccactccctcaattctcaagtcacaggtcttccccttggtacaaccttgtttgtctgcaaactggcctgtatcaatagtgatgaaattcaaatatgtggagcagagatcttcgttggtgttgctccagaacagcctcaaaatttatcctgcatacagaagggagaacaggggactgtggcctgcacctgggaaagaggacgagacacccacttatacactgagtatactctacagctaagtggaccaaaaaatttaacctggcagaagcaatgtaaagacatttattgtgactatttggactttggaatcaacctcacccctgaatcacctgaatccaatttcacagccaaggttactgctgtcaatagtcttggaagctcctcttcacttccatccacattcacattcttggacatagtgaggcctcttcctccgtgggacattagaatcaaatttcaaaaggcttctgtgagcagatgtaccctttattggagagatgagggactggtactgcttaatcgactcagatatcggcccagtaacagcaggctctggaatatggttaatgttacaaaggccaaaggaagacatgatttgctggatctgaaaccatttacagaatatgaatttcagatttcctctaagctacatctttataagggaagttggagtgattggagtgaatcattgagagcacaaacaccagaagaagagcctactgggatgttagatgtctggtacatgaaacggcacattgactacagtagacaacagatttctcttttctggaagaatctgagtgtctcagaggcaagaggaaaaattctccactatcaggtgaccttgcaggagctgacaggagggaaagccatgacacagaacatcacaggacacacctcctggaccacagtcattcctagaaccggaaattgggctgtggctgtgtctgcagcaaattcaaaaggcagttctctgcccactcgtattaacataatgaacctgtgtgaggcagggttgctggctcctcgccaggtctctgcaaactcagagggcatggacaacattctggtgacttggcagcctcccaggaaagatccctctgctgttcaggagtacgtggtggaatggagagagctccatccagggggtgacacacaggtccctctaaactggctacggagtcgaccctacaatgtgtctgctctgatttcagagaacataaaatcctacatctgttatgaaatccgtgtgtatgcactctcaggggatcaaggaggatgcagctccatcctgggtaactctaagcacaaagcaccactgagtggcccccacattaatgccatcacagaggaaaaggggagcattttaatttcatggaacagcattccagtccaggagcaaatgggctgcctcctccattataggatatactggaaggaacgggactccaactcccagcctcagctctgtgaaattccctacagagtctcccaaaattcacatccaataaacagcctgcagccccgagtgacatatgtcctgtggatgacagctctgacagctgctggtgaaagttcccacggaaatgagagggaattttgtctgcaaggtaaagccaattggatggcgtttgtggcaccaagcatttgcattgctatcatcatggtgggcattttctcaacgcattacttccagcaaaagagaagacacagctgcccttggacaggctcctgatagactggcccacgcctgaagatcctgaaccgctggtcatcagtgaagtccttcatcaagtgaccccagttttcagacatcccccctgctccaactggccacaaagggaaaaaggaatccaaggtcatcaggcctctgagaaagacatgatgcacagtgcctcaagcccaccacctccaagagctctccaagctgagagcagacaactggtggatctgtacaaggtgctggagagcaggggctccgacccaaagcccgaaaacccagcctgtccctggacggtgctcccagcaggtgaccttcccacccatgatggctacttaccctccaacatagatgacctcccctcacatgaggcacctctcgctgactctctggaagaactggagcctcagcacatctccctttctgttttcccctcaagttctcttcacccactcaccttctcctgtggtgataagctgactctggatcagttaaagatgaggtgtgactccctcatgctctgagtggtgaggcttcaagccttaaagtcagtgtgccctcaaccagcacagcctgccccaattcccccagcccctgctccagcagctgtcatctctgggtgccaccatcggtctggctgcagctagaggacaggcaagccagctctgggggagtcttaggaactgggagttggtcttcactcagatgcctcatcttgcctttcccagggccttaaaattacatccttcactgtgtggacctagagactccaacttgaattcctagtaactttcttggtatgctggccagaaagggaaatgaggaggagagtagaaaccacagctcttagtagtaatggcatacagtctagaggaccattcatgcaatgactatttctaaagcacctgctacacagcaggctgtacacagcagatcagtactgttcaacagaacttcctgagatgatggaaatgttctacctctgcactcactgtccagtacattagacactaggcacattggctgttaatcacttggaatgtgtttagcttgactgaggaattaaattttgattgtaaatttaaatcgccacacatggctagtggctactgtattggagtgcacagctctagatggctcctagattattgagagccttcaaaacaaatcaacctagttctatagatgaagacataaaagacactggtaaacaccaaggtaaaagggcccccaaggtggtcatgactggtctcatttgcagaagtctaagaatgtacctttttctggccgggcgtggtagctcatgcctgtaatcccagcactttgggaggctga

SEQ ID NO: 10 - DNA, 3782 bp, Homo sapiens
tgcagagcacagagaaaggacatctgcgaggaaagttccctgatggctgtcaacaaagtgccacgtctctatggctgtgaacgctgagcacacgattttatcgcgcctatcatatcttggtgcataaacgcacctcacctcggtcaacccttgctccgtcttatgagacaggctttattatccgcattttatatgaggggaaactgacggtggagagagaattatcttgctcaaggcgacacagcagagcccacaggtggcagaatcccacccgagcccgcttcgacccgcggggtggaaaccacgggcgcccgcccggctgcgcttccagagctgaactgagaagcgagtcctctccgccctgcggccaccgcccagccccgacccccgccccggcccgatcctcactcgccgccagctccccgcgcccaccccggagttggtggcgcagaggcgggaggcggaggcgggagggcgggcgctggcaccgggaacgcccgagcgccggcagagagcgcggagagcgcgacacgtgcggcccagagcaccggggccacccggtccccgcaggcccgggaccgcgcccgctggcaggcgacacgtggaagaatacggagttctataccagagttgattgttgatggcacatacttttagaggatgctcattggcatttatgtttataatcacgtggctgttgattaaagcaaaaatagatgcgtgcaagagaggcgatgtgactgtgaagccttcccatgtaattttacttggatccactgtcaatattacatgctctttgaagcccagacaaggctgctttcactattccagacgtaacaagttaatcctgtacaagtttgacagaagaatcaattttcaccatggccactccctcaattctcaagtcacaggtcttccccttggtacaaccttgtttgtctgcaaactggcctgtatcaatagtgatgaaattcaaatatgtggagcagagatcttcgttggtgttgctccagaacagcctcaaaatttatcctgcatacagaagggagaacaggggactgtggcctgcacctgggaaagaggacgagacacccacttatacactgagtatactctacagctaagtggaccaaaaaatttaacctggcagaagcaatgtaaagacatttattgtgactatttggactttggaatcaacctcacccctgaatcacctgaatccaatttcacagccaaggttactgctgtcaatagtcttggaagctcctcttcacttccatccacattcacattcttggacatagtgaggcctcttcctccgtgggacattagaatcaaatttcaaaaggcttctgtgagcagatgtaccctttattggagagatgagggactggtactgcttaatcgactcagatatcggcccagtaacagcaggctctggaatatggttaatgttacaaaggccaaaggaagacatgatttgctggatctgaaaccatttacagaatatgaatttcagatttcctctaagctacatctttataagggaagttggagtgattggagtgaatcattgagagcacaaacaccagaagaagagcctactgggatgttagatgtctggtacatgaaacggcacattgactacagtagacaacagatttctcttttctggaagaatctgagtgtctcagaggcaagaggaaaaattctccactatcaggtgaccttgcaggagctgacaggagggaaagccatgacacagaacatcacaggacacacctcctggaccacagtcattcctagaaccggaaattgggctgtggctgtgtctgcagcaaattcaaaaggcagttctctgcccactcgtattaacataatgaacctgtgtgaggcagggttgctggctcctcgccaggtctctgcaaactcagagggcatggacaacattctggtgacttggcagcctcccaggaaagatccctctgctgttcaggagtacgtggtggaatggagagagctccatccagggggtgacacacaggtccctctaaactggctacggagtcgaccctacaatgtgtctgctctgatttcagaaattccctacagagtctcccaaaattcacatccaataaacagcctgcagccccgagtgacatatgtcctgtggatgacagctctgacagctgctggtgaaagttcccacggaaatgagagggaattttgtctgcaaggtaaagccaattggatggcgtttgtggcaccaagcatttgcattgctatcatcatggtgggcattttctcaacgcattacttccagcaaaaggtgtttgttctcctagcagccctcagacctcagtggtgtagcagagaaattccagatccagcaaatagcacttgcgctaagaaatatcccattgcagaggagaagacacagctgcccttggacaggctcctgatagactggcccacgcctgaagatcctgaaccgctggtcatcagtgaagtccttcatcaagtgaccccagttttcagacatcccccctgctccaactggccacaaagggaaaaaggaatccaaggtcatcaggcctctgagaaagacatgatgcacagtgcctcaagcccaccacctccaagagctctccaagctgagagcagacaactggtggatctgtacaaggtgctggagagcaggggctccgacccaaagcccgaaaacccagcctgtccctggacggtgctcccagcaggtgaccttcccacccatgatggctacttaccctccaacatagatgacctcccctcacatgaggcacctctcgctgactctctggaagaactggagcctcagcacatctccctttctgttttcccctcaagttctcttcacccactcaccttctcctgtggtgataagctgactctggatcagttaaagatgaggtgtgactccctcatgctctgagtggtgaggcttcaagccttaaagtcagtgtgccctcaaccagcacagcctgccccaattcccccagcccctgctccagcagctgtcatctctgggtgccaccatcggtctggctgcagctagaggacaggcaagccagctctgggggagtcttaggaactgggagttggtcttcactcagatgcctcatcttgcctttcccagggccttaaaattacatccttcactgtgtggacctagagactccaacttgaattcctagtaactttcttggtatgctggccagaaagggaaatgaggaggagagtagaaaccacagctcttagtagtaatggcatacagtctagaggaccattcatgcaatgactatttctaaagcacctgctacacagcaggctgtacacagcagatcagtactgttcaacagaacttcctgagatgatggaaatgttctacctctgcactcactgtccagtacattagacactaggcacattggctgttaatcacttggaatgtgtttagcttgactgaggaattaaattttgattgtaaatttaaatcgccacacatggctagtggctactgtattggagtgcacagctctagatggctcctagattattgagagccttcaaaacaaatcaacctagttctatagatgaagacataaaagacactggtaaacaccaaggtaaaagggcccccaaggtggtcatgactggtctcatttgcagaagtctaagaatgtacctttttctggccgggcgtggtagctcatgcctgtaatcccagcactttgggaggctga

SEQ ID NO: 11 - DNA, 3849 bp, Homo sapiens
tgcagagcacagagaaaggacatctgcgaggaaagttccctgatggctgtcaacaaagtgccacgtctctatggctgtgaacgctgagcacacgattttatcgcgcctatcatatcttggtgcataaacgcacctcacctcggtcaacccttgctccgtcttatgagacaggctttattatccgcattttatatgaggggaaactgacggtggagagagaattatcttgctcaaggcgacacagcagagcccacaggtggcagaatcccacccgagcccgcttcgacccgcggggtggaaaccacgggcgcccgcccggctgcgcttccagagctgaactgagaagcgagtcctctccgccctgcggccaccgcccagccccgacccccgccccggcccgatcctcactcgccgccagctccccgcgcccaccccggagttggtggcgcagaggcgggaggcggaggcgggagggcgggcgctggcaccgggaacgcccgagcgccggcagagagcgcggagagcgcgacacgtgcggcccagagcaccggggccacccggtccccgcaggcccgggaccgcgcccgctggcaggcgacacgtggaagaatacggagttctataccagagttgattgttgatggcacatacttttagaggatgctcattggcatttatgtttataatcacgtggctgttgattaaagcaaaaatagatgcgtgcaagagaggcgatgtgactgtgaagccttcccatgtaattttacttggatccactgtcaatattacatgctctttgaagcccagacaaggctgctttcactattccagacgtaacaagttaatcctgtacaagtttgacagaagaatcaattttcaccatggccactccctcaattctcaagtcacaggtcttccccttggtacaaccttgtttgtctgcaaactggcctgtatcaatagtgatgaaattcaaatatgtggagcagagatcttcgttggtgttgctccagaacagcctcaaaatttatcctgcatacagaagggagaacaggggactgtggcctgcacctgggaaagaggacgagacacccacttatacactgagtatactctacagctaagtggaccaaaaaatttaacctggcagaagcaatgtaaagacatttattgtgactatttggactttggaatcaacctcacccctgaatcacctgaatccaatttcacagccaaggttactgctgtcaatagtcttggaagctcctcttcacttccatccacattcacattcttggacatagtgaggcctcttcctccgtgggacattagaatcaaatttcaaaaggcttctgtgagcagatgtaccctttattggagagatgagggactggtactgcttaatcgactcagatatcggcccagtaacagcaggctctggaatatggttaatgttacaaaggccaaaggaagacatgatttgctggatctgaaaccatttacagaatatgaatttcagatttcctctaagctacatctttataagggaagttggagtgattggagtgaatcattgagagcacaaacaccagaagaagagcctactgggatgttagatgtctggtacatgaaacggcacattgactacagtagacaacagatttctcttttctggaagaatctgagtgtctcagaggcaagaggaaaaattctccactatcaggtgaccttgcaggagctgacaggagggaaagccatgacacagaacatcacaggacacacctcctggaccacagtcattcctagaaccggaaattgggctgtggctgtgtctgcagcaaattcaaaaggcagttctctgcccactcgtattaacataatgaacctgtgtgaggcagggttgctggctcctcgccaggtctctgcaaactcagagggcatggacaacattctggtgacttggcagcctcccaggaaagatccctctgctgttcaggagtacgtggtggaatggagagagctccatccagggggtgacacacaggtccctctaaactggctacggagtcgaccctacaatgtgtctgctctgatttcagagaacataaaatcctacatctgttatgaaatccgtgtgtatgcactctcaggggatcaaggaggatgcagctccatcctgggtaactctaagcacaaagcaccactgagtggcccccacattaatgccatcacagaggaaaaggggagcattttaatttcatggaacagcattccagtccaggagcaaatgggctgcctcctccattataggatatactggaaggaacgggactccaactcccagcctcagctctgtgaaattccctacagagtctcccaaaattcacatccaataaacagcctgcagccccgagtgacatatgtcctgtggatgacagctctgacagctgctggtgaaagttcccacggaaatgagagggaattttgtctgcaaggagaagacacagctgcccttggacaggctcctgatagactggcccacgcctgaagatcctgaaccgctggtcatcagtgaagtccttcatcaagtgaccccagttttcagacatcccccctgctccaactggccacaaagggaaaaaggaatccaaggtcatcaggcctctgagaaagacatgatgcacagtgcctcaagcccaccacctccaagagctctccaagctgagagcagacaactggtggatctgtacaaggtgctggagagcaggggctccgacccaaagcccgaaaacccagcctgtccctggacggtgctcccagcaggtgaccttcccacccatgatggctacttaccctccaacatagatgacctcccctcacatgaggcacctctcgctgactctctggaagaactggagcctcagcacatctccctttctgttttcccctcaagttctcttcacccactcaccttctcctgtggtgataagctgactctggatcagttaaagatgaggtgtgactccctcatgctctgagtggtgaggcttcaagccttaaagtcagtgtgccctcaaccagcacagcctgccccaattcccccagcccctgctccagcagctgtcatctctgggtgccaccatcggtctggctgcagctagaggacaggcaagccagctctgggggagtcttaggaactgggagttggtcttcactcagatgcctcatcttgcctttcccagggccttaaaattacatccttcactgtgtggacctagagactccaacttgaattcctagtaactttcttggtatgctggccagaaagggaaatgaggaggagagtagaaaccacagctcttagtagtaatggcatacagtctagaggaccattcatgcaatgactatttctaaagcacctgctacacagcaggctgtacacagcagatcagtactgttcaacagaacttcctgagatgatggaaatgttctacctctgcactcactgtccagtacattagacactaggcacattggctgttaatcacttggaatgtgtttagcttgactgaggaattaaattttgattgtaaatttaaatcgccacacatggctagtggctactgtattggagtgcacagctctagatggctcctagattattgagagccttcaaaacaaatcaacctagttctatagatgaagacataaaagacactggtaaacaccaaggtaaaagggcccccaaggtggtcatgactggtctcatttgcagaagtctaagaatgtacctttttctggccgggcgtggtagctcatgcctgtaatcccagcactttgggaggctga

SEQ ID NO: 12 - DNA, 2826 bp, Homo sapiens
acaagggtggcagcctggctctgaagtggaattatgtgcttcaaacaggttgaaagagggaaacagtcttttcctgcttccagacatgaatcaggtcactattcaatgggatgcagtaatagccctttacatactcttcagctggtgtcatggaggaattacaaatataaactgctctggccacatctgggtagaaccagccacaatttttaagatgggtatgaatatctctatatattgccaagcagcaattaagaactgccaaccaaggaaacttcatttttataaaaatggcatcaaagaaagatttcaaatcacaaggattaataaaacaacagctcggctttggtataaaaactttctggaaccacatgcttctatgtactgcactgctgaatgtcccaaacattttcaagagacactgatatgtggaaaagacatttcttctggatatccgccagatattcctgatgaagtaacctgtgtcatttatgaatattcaggcaacatgacttgcacctggaatgctgggaagctcacctacatagacacaaaatacgtggtacatgtgaagagtttagagacagaagaagagcaacagtatctcacctcaagctatattaacatctccactgattcattacaaggtggcaagaagtacttggtttgggtccaagcagcaaacgcactaggcatggaagagtcaaaacaactgcaaattcacctggatgatatagtgataccttctgcagccgtcatttccagggctgagactataaatgctacagtgcccaagaccataatttattgggatagtcaaacaacaattgaaaaggtttcctgtgaaatgagatacaaggctacaacaaaccaaacttggaatgttaaagaatttgacaccaattttacatatgtgcaacagtcagaattctacttggagccaaacattaagtacgtatttcaagtgagatgtcaagaaacaggcaaaaggtactggcagccttggagttcaccgttttttcataaaacacctgaaacagttccccaggtcacatcaaaagcattccaacatgacacatggaattctgggctaacagttgcttccatctctacagggcaccttacttctgacaacagaggagacattggacttttattgggaatgatcgtctttgctgttatgttgtcaattctttctttgattgggatatttaacagatcattccgaactgggattaaaagaaggatcttattgttaataccaaagtggctttatgaagatattcctaatatgaaaaacagcaatgttgtgaaaatgctacaggaaaatagtgaacttatgaataataattccagtgagcaggtcctatatgttgatcccatgattacagagataaaagaaatcttcatcccagaacacaagcctacagactacaagaaggagaatacaggacccctggagacaagagactacccgcaaaactcgctattcgacaatactacagttgtatatattcctgatctcaacactggatataaaccccaaatttcaaattttctgcctgagggaagccatctcagcaataataatgaaattacttccttaacacttaaaccaccagttgattccttagactcaggaaataatcccaggttacaaaagcatcctaattttgctttttctgtttcaagtgtgaattcactaagcaacacaatatttcttggagaattaagcctcatattaaatcaaggagaatgcagttctcctgacatacaaaactcagtagaggaggaaaccaccatgcttttggaaaatgattcacccagtgaaactattccagaacagaccctgcttcctgatgaatttgtctcctgtttggggatcgtgaatgaggagttgccatctattaatacttattttccacaaaatattttggaaagccacttcaataggatttcactcttggaaaagtagagctgtgtggtcaaaatcaatatgagaaagctgccttgcaatctgaacttgggttttccctgcaatagaaattgaattctgcctctttttgaaaaaaatgtattcacatacaaatcttcacatggacacatgttttcatttcccttggataaatacctaggtaggggattgctgggccatatgataagcatatgtttcagttctaccaatcttgtttccagagtagtgacatttctgtgctcctaccatcaccatgtaagaattcccgggagctccatgcctttttaattttagccattcttctgcctcatttcttaaaattagagaattaaggtcccgaaggtggaacatgcttcatggtcacacatacaggcacaaaaacagcattatgtggacgcctcatgtattttttatagagtcaactatttcctctttattttccctcattgaaagatgcaaaacagctctctattgtgtacagaaagggtaaataatgcaaaatacctggtagtaaaataaatgctgaaaattttcctttaaaatagaatcattaggccaggcgtggtggctcatgcttgtaatcccagcactttggtaggctgaggtgggtggatcacctgaggtcaggagttcgagtccagcctggccaatatgctgaaaccctgtctctactaaaattacaaaaattagccggccatggtggcaggtgcttgtaatcccagctacttgggaggctgaggcaggagaatcacttgaaccaggaaggcagaggttgcactgagctgagattgtgccactgcactccagcctgggcaacaagagcaaaactctgtctggaaaaaaaaaaaaaa

SEQ ID NO: 13 - DNA, 702 bp, Homo sapiens
atgagcactgaaagcatgatccgggacgtggagctggccgaggaggcgctccccaagaagacaggggggccccagggctccaggcggtgcttgttcctcagcctcttctccttcctgatcgtggcaggcgccaccacgctcttctgcctgctgcactttggagtgatcggcccccagagggaagagttccccagggacctctctctaatcagccctctggcccaggcagtcagatcatcttctcgaaccccgagtgacaagcctgtagcccatgttgtagcaaaccctcaagctgaggggcagctccagtggctgaaccgccgggccaatgccctcctggccaatggcgtggagctgagagataaccagctggtggtgccatcagagggcctgtacctcatctactcccaggtcctcttcaagggccaaggctgcccctccacccatgtgctcctcacccacaccatcagccgcatcgccgtctcctaccagaccaaggtcaacctcctctctgccatcaagagcccctgccagagggagaccccagagggggctgaggccaagccctggtatgagcccatctatctgggaggggtcttccagctggagaagggtgaccgactcagcgctgagatcaatcggcccgactatctcgactttgccgagtctgggcaggtctactttgggatcattgccctgtga

SEQ ID NO: 14 - DNA, 1368 bp, Homo sapiens
atgggcctctccaccgtgcctgacctgctgctgccgctggtgctcctggagctgttggtgggaatatacccctcaggggttattggactggtccctcacctaggggacagggagaagagagatagtgtgtgtccccaaggaaaatatatccaccctcaaaataattcgatttgctgtaccaagtgccacaaaggaacctacttgtacaatgactgtccaggcccggggcaggatacggactgcagggagtgtgagagcggctccttcaccgcttcagaaaaccacctcagacactgcctcagctgctccaaatgccgaaaggaaatgggtcaggtggagatctcttcttgcacagtggaccgggacaccgtgtgtggctgcaggaagaaccagtaccggcattattggagtgaaaaccttttccagtgcttcaattgcagcctctgcctcaatgggaccgtgcacctctcctgccaggagaaacagaacaccgtgtgcacctgccatgcaggtttctttctaagagaaaacgagtgtgtctcctgtagtaactgtaagaaaagcctggagtgcacgaagttgtgcctaccccagattgagaatgttaagggcactgaggactcaggcaccacagtgctgttgcccctggtcattttctttggtctttgccttttatccctcctcttcattggtttaatgtatcgctaccaacggtggaagtccaagctctactccattgtttgtgggaaatcgacacctgaaaaagagggggagcttgaaggaactactactaagcccctggccccaaacccaagcttcagtcccactccaggcttcacccccaccctgggcttcagtcccgtgcccagttccaccttcacctccagctccacctatacccccggtgactgtcccaactttgcggctccccgcagagaggtggcaccaccctatcagggggctgaccccatccttgcgacagccctcgcctccgaccccatccccaacccccttcagaagtgggaggacagcgcccacaagccacagagcctagacactgatgaccccgcgacgctgtacgccgtggtggagaacgtgcccccgttgcgctggaaggaattcgtgcggcgcctagggctgagcgaccacgagatcgatcggctggagctgcagaacgggcgctgcctgcgcgaggcgcaatacagcatgctggcgacctggaggcggcgcacgccgcggcgcgaggccacgctggagctgctgggacgcgtgctccgcgacatggacctgctgggctgcctggaggacatcgaggaggcgctttgcggccccgccgccctcccgcccgcgcccagtcttctcagatga

SEQ ID NO: 15 - DNA, 1386 bp, Homo sapiens
atggcgcccgtcgccgtctgggccgcgctggccgtcggactggagctctgggctgcggcgcacgccttgcccgcccaggtggcatttacaccctacgccccggagcccgggagcacatgccggctcagagaatactatgaccagacagctcagatgtgctgcagcaaatgctcgccgggccaacatgcaaaagtcttctgtaccaagacctcggacaccgtgtgtgactcctgtgaggacagcacatacacccagctctggaactgggttcccgagtgcttgagctgtggctcccgctgtagctctgaccaggtggaaactcaagcctgcactcgggaacagaaccgcatctgcacctgcaggcccggctggtactgcgcgctgagcaagcaggaggggtgccggctgtgcgcgccgctgcgcaagtgccgcccgggcttcggcgtggccagaccaggaactgaaacatcagacgtggtgtgcaagccctgtgccccggggacgttctccaacacgacttcatccacggatatttgcaggccccaccagatctgtaacgtggtggccatccctgggaatgcaagcatggatgcagtctgcacgtccacgtcccccacccggagtatggccccaggggcagtacacttaccccagccagtgtccacacgatcccaacacacgcagccaactccagaacccagcactgctccaagcacctccttcctgctcccaatgggccccagccccccagctgaagggagcactggcgacttcgctcttccagttggactgattgtgggtgtgacagccttgggtctactaataataggagtggtgaactgtgtcatcatgacccaggtgaaaaagaagcccttgtgcctgcagagagaagccaaggtgcctcacttgcctgccgataaggcccggggtacacagggccccgagcagcagcacctgctgatcacagcgccgagctccagcagcagctccctggagagctcggccagtgcgttggacagaagggcgcccactcggaaccagccacaggcaccaggcgtggaggccagtggggccggggaggcccgggccagcaccgggagctcagattcttcccctggtggccatgggacccaggtcaatgtcacctgcatcgtgaacgtctgtagcagctctgaccacagctcacagtgctcctcccaagccagctccacaatgggagacacagattccagcccctcggagtccccgaaggacgagcaggtccccttctccaaggaggaatgtgcctttcggtcacagctggagacgccagagaccctgctggggagcaccgaagagaagcccctgccccttggagtgcctgatgctgggatgaagcccagttaa

SEQ ID NO: 16 - DNA, 939 bp, Homo sapiens
atggcagctgggcaaaatgggcacgaagagtgggtgggcagcgcatacctgtttgtggagtcctcgctggacaaggtggtcctgtcggatgcctacgcgcacccccagcagaaggtggcagtgtacagggctctgcaggctgccttggcagagagcggcgggagcccggacgtgctgcagatgctgaagatccaccgcagcgacccgcagctgatcgtgcagctgcgattctgcgggcggcagccctgtggccgcttcctccgcgcctaccgcgagggggcgctgcgcgccgcgctgcagaggagcctggcggccgcgctcgcccagcactcggtgccgctgcaactggagctgcgcgccggcgccgagcggctggacgctttgctggcggacgaggagcgctgtttgagttgcatcctagcccagcagcccgaccggctccgggatgaagaactggctgagctggaggatgcgctgcgaaatctgaagtgcggctcgggggcccggggtggcgacggggaggtcgcttcggcccccttgcagcccccggtgccctctctgtcggaggtgaagccgccgccgccgccgccacctgcccagacttttctgttccagggtcagcctgtagtgaatcggccgctgagcctgaaggaccaacagacgttcgcgcgctctgtgggtctcaaatggcgcaaggtggggcgctcactgcagcgaggctgccgggcgctgcgggacccggcgctggactcgctggcctacgagtacgagcgcgagggactgtacgagcaggccttccagctgctgcggcgcttcgtgcaggccgagggccgccgcgccacgctgcagcgcctggtggaggcactcgaggagaacgagctcaccagcctggcagaggacttgctgggcctgaccgatcccaatggcggcctggcctag

SEQ ID NO: 17 - DNA, 1506 bp, Homo sapiens
atggctgcagctagcgtgaccccccctggctccctggagttgctacagcccggcttctccaagaccctcctggggaccaagctggaagccaagtacctgtgctccgcctgcagaaacgtcctccgcaggcccttccaggcgcagtgtggccaccggtactgctccttctgcctggccagcatcctcagctctgggcctcagaactgtgctgcctgtgttcacgagggcatatatgaagaaggcatttctattttagaaagcagttcggccttcccagataatgctgcccgcagggaggtggagagcctgccggccgtctgtcccagtgatggatgcacctggaaggggaccctgaaagaatacgagagctgccacgaaggccgctgcccgctcatgctgaccgaatgtcccgcgtgcaaaggcctggtccgccttggtgaaaaggagcgccacctggagcacgagtgcccggagagaagcctgagctgccggcattgccgggcaccctgctgcggagcagacgtgaaggcgcaccacgaggtctgccccaagttccccttaacttgtgacggctgcggcaagaagaagatcccccgggagaagtttcaggaccacgtcaagacttgtggcaagtgtcgagtcccttgcagattccacgccatcggctgcctcgagacggtagagggtgagaaacagcaggagcacgaggtgcagtggctgcgggagcacctggccatgctactgagctcggtgctggaggcaaagcccctcttgggagaccagagccacgcggggtcagagctcctgcagaggtgcgagagcctggagaagaagacggccacttttgagaacattgtctgcgtcctgaaccgggaggtggagagggtggccatgactgccgaggcctgcagccggcagcaccggctggaccaagacaagattgaagccctgagtagcaaggtgcagcagctggagaggagcattggcctcaaggacctggcgatggctgacttggagcagaaggtcttggagatggaggcatccacctacgatggggtcttcatctggaagatctcagacttcgccaggaagcgccaggaagctgtggctggccgcatacccgccatcttctccccagccttctacaccagcaggtacggctacaagatgtgtctgcgtatctacctgaacggcgacggcaccgggcgaggaacacacctgtccctcttctttgtggtgatgaagggcccgaatgacgccctgctgcggtggcccttcaaccagaaggtgaccttaatgctgctcgaccagaataaccgggagcacgtgattgacgccttcaggcccgacgtgacttcatcctcttttcagaggccagtcaacgacatgaacatcgcaagcggctgccccctcttctgccccgtctccaagatggaggcaaagaattcctacgtgcgggacgatgccatcttcatcaaggccattgtggacctgacagggctctaa

SEQ ID NO: 18 - DNA, 4539 bp, Homo sapiens
atggcggcggcggcggggaatcgcgcctcgtcgtcgggattcccgggcgccagggctacgagccctgaggcaggcggcggcggaggagccctcaaggcgagcagcgcgcccgcggctgccgcgggactgctgcgggaggcgggcagcgggggccgcgagcgggcggactggcggcggcggcagctgcgcaaagtgcggagtgtggagctggaccagctgcctgagcagccgctcttccttgccgcctcaccgccggcctcctcgacttccccgtcgccggagcccgcggacgcagcggggagtgggaccggcttccagcctgtggcggtgccgccgccccacggagccgcgagccgcggcggcgcccaccttaccgagtcggtggcggcgccggacagcggcgcctcgagtcccgcagcggccgagcccggggagaagcgggcgcccgccgccgagccgtctcctgcagcggcccccgccggtcgtgagatggagaataaagaaactctcaaagggttgcacaagatggatgatcgtccagaggaacgaatgatcagggagaaactgaaggcaacctgtatgccagcctggaagcacgaatggttggaaaggagaaataggcgagggcctgtggtggtaaaaccaatcccagttaaaggagatggatctgaaatgaatcacttagcagctgagtctccaggagaggtccaggcaagtgcggcttcaccagcttccaaaggccgacgcagtccttctcctggcaactccccatcaggtcgcacagtgaaatcagaatctccaggagtaaggagaaaaagagtttccccagtgccttttcagagtggcagaatcacaccaccccgaagagccccttcaccagatggcttctcaccatatagccctgaggaaacaaaccgccgtgttaacaaagtgatgcgggccagactgtacttactgcagcagatagggcctaactctttcctgattggaggagacagcccagacaataaataccgggtgtttattgggcctcagaactgcagctgtgcacgtggaacattctgtattcatctgctatttgtgatgctccgggtgtttcaactagaaccttcagacccaatgttatggagaaaaactttaaagaattttgaggttgagagtttgttccagaaatatcacagtaggcgtagctcaaggatcaaagctccatctcgtaacaccatccagaagtttgtttcacgcatgtcaaattctcatacattgtcatcatctagtacttctacgtctagttcagaaaacagcataaaggatgaagaggaacagatgtgtcctatttgcttgttgggcatgcttgatgaagaaagtcttacagtgtgtgaagacggctgcaggaacaagctgcaccaccactgcatgtcaatttgggcagaagagtgtagaagaaatagagaacctttaatatgtcccctttgtagatctaagtggagatctcatgatttctacagccacgagttgtcaagtcctgtggattccccttcttccctcagagctgcacagcagcaaaccgtacagcagcagcctttggctggatcacgaaggaatcaagagagcaattttaaccttactcattatggaactcagcaaatccctcctgcttacaaagatttagctgagccatggattcaggtgtttggaatggaactcgttggctgcttattttctagaaactggaatgtgagagagatggccctcaggcgtctttcccatgatgtcagtggggccctgctgttggcaaatggggagagcactggaaattctgggggcagcagtggaagcagcccgagtgggggagccaccagtgggtcttcccagaccagtatctcaggagatgtggtggaggcatgctgcagcgttctgtcaatggtctgtgctgaccctgtctacaaagtgtacgttgctgctttaaaaacattgagagccatgctggtatatactccttgccacagtttagcggaaagaatcaaacttcagagacttctccagccagttgtagacaccatcctagtcaaatgtgcagatgccaatagccgcacaagtcagctgtccatatcaacactgttggaactgtgcaaaggccaagcaggagagttggcagttggcagagaaatactaaaagctggatccattggtattggtggtgttgattatgtcttaaattgtattcttggaaaccaaactgaatcaaacaattggcaagaacttcttggccgcctttgtcttatagatagactgttgttggaatttcctgctgaattttatcctcatattgtcagtactgatgtttcacaagctgagcctgttgaaatcaggtataagaagctgctgtccctcttaacctttgctttgcagtccattgataattcccactcaatggttggcaaactttccagaaggatctacttgagttctgcaagaatggttactacagtaccccatgtgttttcaaaactgttagaaatgctgagtgtttccagttccactcacttcaccaggatgcgtcgccgtttgatggctattgcagatgaggtggaaattgccgaagccatccagttgggcgtagaagacactttggatggtcaacaggacagcttcttgcaggcatctgttcccaacaactatctggaaaccacagagaacagttcccctgagtgcacagtccatttagagaaaactggaaaaggattatgtgctacaaaattgagtgccagttcagaggacatttctgagagactggccagcatttcagtaggaccttctagttcaacaacaacaacaacaacaacaacagagcaaccaaagccaatggttcaaacaaaaggcagaccccacagtcagtgtttgaactcctctcctttatctcatcattcccaattaatgtttccagccttgtcaaccccttcttcttctaccccatctgtaccagctggcactgcaacagatgtctctaagcatagacttcagggattcattccctgcagaataccttctgcatctcctcaaacacagcgcaagttttctctacaattccacagaaactgtcctgaaaacaaagactcagataaactttccccagtctttactcagtcaagacccttgccctccagtaacatacacaggccaaagccatctagacctaccccaggtaatacaagtaaacagggagatccctcaaaaaatagcatgacacttgatctgaacagtagttccaaatgtgatgacagctttggctgtagcagcaatagtagtaatgctgttatacccagtgacgagacagtgttcaccccagtagaggagaaatgcagattagatgtcaatacagagctcaactccagtattgaggaccttcttgaagcatctatgccttcaagtgatacaacagtaacttttaagtcagaagttgctgtcctgtctcctgaaaaggctgaaaatgatgatacctacaaagatgatgtgaatcataatcaaaagtgcaaagagaagatggaagctgaagaagaagaagctttagcaattgccatggcaatgtcagcgtctcaggatgccctccccatagttcctcagctgcaggttgaaaatggagaagatatcatcattattcaacaggatacaccagagactctaccaggacataccaaagcaaaacaaccgtatagagaagacactgaatggctgaaaggtcaacagataggccttggagcattttcttcttgttatcaggctcaagatgtgggaactggaactttaatggctgttaaacaggtgacttatgtcagaaacacatcttctgagcaagaagaagtagtagaagcactaagagaagagataagaatgatgagccatctgaatcatccaaacatcattaggatgttgggagccacgtgtgagaagagcaattacaatctcttcattgaatggatggcagggggatcggtggctcatttgctgagtaaatatggagccttcaaagaatcagtagttattaactacactgaacagttactccgtggcctttcgtatctccatgaaaaccaaatcattcacagagatgtcaaaggtgccaatttgctaattgacagcactggtcagagactaagaattgcagattttggagctgcagccaggttggcatcaaaaggaactggtgcaggagagtttcagggacaattactggggacaattgcatttatggcacctgaggtactaagaggtcaacagtatggaaggagctgtgatgtatggagtgttggctgtgctattatagaaatggcttgtgcaaaaccaccatggaatgcagaaaaacactccaatcatcttgctttgatatttaagattgctagtgcaactactgctccatcgatcccttcacatttgtctcctggtttacgagatgtggctcttcgttgtttagaacttcaacctcaggacagacctccatcaagagagctactgaagcatccagtctttcgtactacatggtag

SEQ ID NO: 19 - DNA, 4827 bp, Homo sapiens
atgagagaagccgctgccgcgctggtccctcctcccgcctttgccgtcacgcctgccgccgccatggaggagccgccgccaccgccgccgccgccaccaccgccaccggaacccgagaccgagtcagaacccgagtgctgcttggcggcgaggcaagagggcacattgggagattcagcttgcaagagtcctgaatctgatctagaagacttctccgatgaaacaaatacagagaatctttatggtacctctccccccagcacacctcgacagatgaaacgcatgtcaaccaaacatcagaggaataatgtggggaggccagccagtcggtctaatttgaaagaaaaaatgaatgcaccaaatcagcctccacataaagacactggaaaaacagtggagaatgtggaagaatacagctataagcaggagaaaaagatccgagcagctcttagaacaacagagcgtgatcataaaaaaaatgtacagtgctcattcatgttagactcagtgggtggatctttgccaaaaaaatcaattccagatgtggatctcaataagccttacctcagccttggctgtagcaatgctaagcttccagtatctgtgcccatgcctatagccagacctgcacgccagacttctaggactgactgtccagcagatcgtttaaagttttttgaaactttacgacttttgctaaagcttacctcagtctcaaagaaaaaagacagggagcaaagaggacaagaaaatacgtctggtttctggcttaaccgatctaacgaactgatctggttagagctacaagcctggcatgcaggacggacaattaacgaccaggacttctttttatatacagcccgtcaagccatcccagatattattaatgaaatccttactttcaaagtcgactatgggagcttcgcctttgttagagatagagctggttttaatggtacttcagtagaagggcagtgcaaagccactcctggaacaaagattgtaggttactcaacacatcatgagcatctccaacgccagagggtctcatttgagcaggtaaaacggataatggagctgctagagtacatagaagcactttatccatcattgcaggctcttcagaaggactatgaaaaatatgctgcaaaagacttccaggacagggtgcaggcactctgtttgtggttaaacatcacaaaagacttaaatcagaaattaaggattatgggcactgttttgggcatcaagaatttatcagacattggctggccagtgtttgaaatcccttcccctcgaccatccaaaggtaatgagccggagtatgagggtgatgacacagaaggagaattaaaggagttggaaagtagtacggatgagagtgaagaagaacaaatctctgatcctagggtaccggaaatcagacagcccatagataacagcttcgacatccagtcgcgggactgcatatccaagaagcttgagaggctcgaatctgaggatgattctcttggctggggagcaccagactggagcacagaagcaggctttagtagacattgtctgacttctatttatagaccatttgtagacaaagcactgaagcagatggggttaagaaagttaattttaagacttcacaagctaatggatggttccttgcaaagggcacgtatagcattggtaaagaacgatcgtccagtggagttttctgaatttccagatcccatgtggggttcagattatgtgcagttgtcaaggacaccaccttcatctgaggagaaatgcagtgctgtgtcgtgggaggagctgaaggccatggatttaccttcattcgaacctgccttcctagttctctgccgagtccttctgaatgtcatacatgagtgtctgaagttaagattggagcagagacctgctggagaaccatctctcttgagtattaagcagctggtgagagagtgtaaggaggtcctgaagggcggcctgctgatgaagcagtactaccagttcatgctgcaggaggttctggaggacttggagaagcccgactgcaacattgacgcttttgaagaggatctacataaaatgcttatggtgtattttgattacatgagaagctggatccaaatgctacagcaattacctcaagcatcgcatagtttaaaaaatctgttagaagaagaatggaatttcaccaaagaaataactcattacatacggggaggagaagcacaggccgggaagcttttctgtgacattgcaggaatgctgctgaaatctacaggaagttttttagaatttggcttacaggagagctgtgctgaattttggactagtgcggatgacagcagtgcttccgacgaaatcaggaggtctgttatagagatcagtcgagccctgaaggagctcttccatgaagccagagaaagggcttccaaagcacttggatttgctaaaatgttgagaaaggacctggaaatagcagcagaattcaggctttcagccccagttagagacctcctggatgttctgaaatcaaaacagtatgtcaaggtgcaaattcctgggttagaaaacttgcaaatgtttgttccagacactcttgctgaggagaagagtattattttgcagttactcaatgcagctgcaggaaaggactgttcaaaagattcagatgacgtactcatcgatgcctatctgcttctgaccaagcacggtgatcgagcccgtgattcagaggacagctggggcacctgggaggcacagcctgtcaaagtcgtgcctcaggtggagactgttgacaccctgagaagcatgcaggtggataatcttttactagttgtcatgcagtctgcgcatctcacaattcagagaaaagctttccagcagtccattgagggacttatgactctgtgccaggagcagacatccagtcagccggtcatcgccaaagctttgcagcagctgaagaatgatgcattggagctatgcaacaggataagcaatgccattgaccgcgtggaccacatgttcacatcagaatttgatgctgaggttgatgaatctgaatctgtcaccttgcaacagtactaccgagaagcaatgattcaggggtacaattttggatttgagtatcataaagaagttgttcgtttgatgtctggggagtttagacagaagataggagacaaatatataagctttgcccggaagtggatgaattatgtcctgactaaatgtgagagtggtagaggtacaagacccaggtgggcgactcaaggatttgattttctacaagcaattgaacctgcctttatttcagctttaccagaagatgacttcttgagtttacaagccttgatgaatgaatgcattggccatgtcataggaaaaccacacagtcctgttacaggtttgtaccttgccattcatcggaacagcccccgtcctatgaaggtacctcgatgccatagtgaccctcctaacccacacctcattatccccactccagagggattcagcactcggagcatgccttccgacgcgcggagccatggcagccctgctgctgctgctgctgctgctgctgctgctgttgctgccagtcggcccagcccctctggtggtgactctgtgctgcccaaatccatcagcagtgcccatgataccaggggttccagcgttcctgaaaatgatcgattggcttccatagctgctgaattgcagtttaggtccctgagtcgtcactcaagccccacggaggagcgagatgaaccagcatatccaagaggagattcaagtgggtccacaagaagaagttgggaacttcggacactaatcagccagagtaaagatactgcttctaaactaggacccatagaagctatccagaagtcagtccgattgtttgaagaaaagaggtaccgagaaatgaggagaaagaatatcattggtcaagtttgtgatacgcctaagtcctatgataatgttatgcacgttggcttgaggaaggtgaccttcaaatggcaaagaggaaacaaaattggagaaggccagtatgggaaggtgtacacctgcatcagcgtcgacaccggggagctgatggccatgaaagagattcgatttcaacctaatgaccataagactatcaaggaaactgcagacgaattgaaaatattcgaaggcatcaaacaccccaatctggttcggtattttggtgtggagctccatagagaagaaatgtacatcttcatggagtactgcgatgaggggactttagaagaggtgtcaaggctgggacttcaggaacatgtgattaggctgtattcaaagcagatcaccattgcgatcaacgtcctccatgagcatggcatagtccaccgtgacattaaaggtgccaatatcttccttacctcatctggattaatcaaactgggagattttggatgttcagtaaagctcaaaaacaatgcccagaccatgcctggtgaagtgaacagcaccctggggacagcagcatacatggcacctgaagtcatcactcgtgccaaaggagagggccatgggcgtgcggccgacatctggagtctggggtgtgttgtcatagagatggtgactggcaagaggccttggcatgagtatgagcacaactttcaaattatgtataaagtggggatgggacataagccaccaatccctgaaagattaagccctgaaggaaaggacttcctttctcactgccttgagagtgacccaaagatgagatggaccgccagccagctcctcgaccattcgtttgtcaaggtttgcacagatgaagaatga

SEQ ID NO: 20 - DNA, 1740 bp, Homo sapiens
atgtctacagcctctgccgcctcctcctcctcctcgtcttcggccggtgagatgatcgaagccccttcccaggtcctcaactttgaagagatcgactacaaggagatcgaggtggaagaggttgttggaagaggagcctttggagttgtttgcaaagctaagtggagagcaaaagatgttgctattaaacaaatagaaagtgaatctgagaggaaagcgtttattgtagagcttcggcagttatcccgtgtgaaccatcctaatattgtaaagctttatggagcctgcttgaatccagtgtgtcttgtgatggaatatgctgaagggggctctttatataatgtgctgcatggtgctgaaccattgccatattatactgctgcccacgcaatgagttggtgtttacagtgttcccaaggagtggcttatcttcacagcatgcaacccaaagcgctaattcacagggacctgaaaccaccaaacttactgctggttgcaggggggacagttctaaaaatttgtgattttggtacagcctgtgacattcagacacacatgaccaataacaaggggagtgctgcttggatggcacctgaagtttttgaaggtagtaattacagtgaaaaatgtgacgtcttcagctggggtattattctttgggaagtgataacgcgtcggaaaccctttgatgagattggtggcccagctttccgaatcatgtgggctgttcataatggtactcgaccaccactgataaaaaatttacctaagcccattgagagcctgatgactcgttgttggtctaaagatccttcccagcgcccttcaatggaggaaattgtgaaaataatgactcacttgatgcggtactttccaggagcagatgagccattacagtatccttgtcagtattcagatgaaggacagagcaactctgccaccagtacaggctcattcatggacattgcttctacaaatacgagtaacaaaagtgacactaatatggagcaagttcctgccacaaatgatactattaagcgcttagaatcaaaattgttgaaaaatcaggcaaagcaacagagtgaatctggacgtttaagcttgggagcctcccgtgggagcagtgtggagagcttgcccccaacctctgagggcaagaggatgagtgctgacatgtctgaaatagaagctaggatcgccgcaaccacaggcaacggacagccaagacgtagatccatccaagacttgactgtaactggaacagaacctggtcaggtgagcagtaggtcatccagtcccagtgtcagaatgattactacctcaggaccaacctcagaaaagccaactcgaagtcatccatggacccctgatgattccacagataccaatggatcagataactccatcccaatggcttatcttacactggatcaccaactacagcctctagcaccgtgcccaaactccaaagaatctatggcagtgtttgaacagcattgtaaaatggcacaagaatatatgaaagttcaaacagaaattgcattgttattacagagaaagcaagaactagttgcagaactggaccaggatgaaaaggaccagcaaaatacatctcgcctggtacaggaacataaaaagcttttagatgaaaacaaaagcctttctacttactaccagcaatgcaaaaaacaactagaggtcatcagaagtcagcagcagaaacgacaaggcacttcatga

SEQ ID NO: 21 - DNA, 1284 bp, Homo sapiens
atgagcagaagcaagcgtgacaacaatttttatagtgtagagattggagattctacattcacagtcctgaaacgatatcagaatttaaaacctataggctcaggagctcaaggaatagtatgcgcagcttatgatgccattcttgaaagaaatgttgcaatcaagaagctaagccgaccatttcagaatcagactcatgccaagcgggcctacagagagctagttcttatgaaatgtgttaatcacaaaaatataattggccttttgaatgttttcacaccacagaaatccctagaagaatttcaagatgtttacatagtcatggagctcatggatgcaaatctttgccaagtgattcagatggagctagatcatgaaagaatgtcctaccttctctatcagatgctgtgtggaatcaagcaccttcattctgctggaattattcatcgggacttaaagcccagtaatatagtagtaaaatctgattgcactttgaagattcttgacttcggtctggccaggactgcaggaacgagttttatgatgacgccttatgtagtgactcgctactacagagcacccgaggtcatccttggcatgggctacaaggaaaacgttgacatttggtcagttgggtgcatcatgggagaaatgatcaaaggtggtgttttgttcccaggtacagatcatattgatcagtggaataaagttattgaacagcttggaacaccatgtcctgaattcatgaagaaactgcaaccaacagtaaggacttacgttgaaaacagacctaaatatgctggatatagctttgagaaactcttccctgatgtccttttcccagctgactcagaacacaacaaacttaaagccagtcaggcaagggatttgttatccaaaatgctggtaatagatgcatctaaaaggatctctgtagatgaagctctccaacacccgtacatcaatgtctggtatgatccttctgaagcagaagctccaccaccaaagatccctgacaagcagttagatgaaagggaacacacaatagaagagtggaaagaattgatatataaggaagttatggacttggaggagagaaccaagaatggagttatacgggggcagccctctcctttaggtgcagcagtgatcaatggctctcagcatccatcatcatcgtcgtctgtcaatgatgtgtcttcaatgtcaacagatccgactttggcctctgatacagacagcagtctagaagcagcagctgggcctctgggctgctgtagatga

SEQ ID NO: 22 - DNA, 996 bp, Homo sapiens
atgactgcaaagatggaaacgaccttctatgacgatgccctcaacgcctcgttcctcccgtccgagagcggaccttatggctacagtaaccccaagatcctgaaacagagcatgaccctgaacctggccgacccagtggggagcctgaagccgcacctccgcgccaagaactcggacctcctcacctcgcccgacgtggggctgctcaagctggcgtcgcccgagctggagcgcctgataatccagtccagcaacgggcacatcaccaccacgccgacccccacccagttcctgtgccccaagaacgtgacagatgagcaggagggcttcgccgagggcttcgtgcgcgccctggccgaactgcacagccagaacacgctgcccagcgtcacgtcggcggcgcagccggtcaacggggcaggcatggtggctcccgcggtagcctcggtggcagggggcagcggcagcggcggcttcagcgccagcctgcacagcgagccgccggtctacgcaaacctcagcaacttcaacccaggcgcgctgagcagcggcggcggggcgccctcctacggcgcggccggcctggcctttcccgcgcaaccccagcagcagcagcagccgccgcaccacctgccccagcagatgcccgtgcagcacccgcggctgcaggccctgaaggaggagcctcagacagtgcccgagatgcccggcgagacaccgcccctgtcccccatcgacatggagtcccaggagcggatcaaggcggagaggaagcgcatgaggaaccgcatcgctgcctccaagtgccgaaaaaggaagctggagagaatcgcccggctggaggaaaaagtgaaaaccttgaaagctcagaactcggagctggcgtccacggccaacatgctcagggaacaggtggcacagcttaaacagaaagtcatgaaccacgttaacagtgggtgccaactcatgctaacgcagcagttgcaaacattttga

SEQ ID NO: 23 - DNA, 4125 bp, Homo sapiens
atgagcacggaggcggacgagggcatcactttctctgtgccacccttcgccccctcgggcttctgcaccatccccgagggcggcatctgcaggaggggaggagcggcggcggtgggcgagggcgaggagcaccagctgccaccgccgccgccgggcagcttctggaacgtggagagcgccgctgcccctggcatcggttgtccggcggccacctcctcgagcagtgccacccgaggccggggcagctctgttggcgggggcagccgacggaccacggtggcatatgtgatcaacgaagcgagccaagggcaactggtggtggccgagagcgaggccctgcagagcttgcgggaggcgtgcgagacagtgggcgccaccctggaaaccctgcattttgggaaactcgactttggagaaaccaccgtgctggaccgcttttacaatgcagatattgcggtggtggagatgagcgatgccttccggcagccgtccttgttttaccaccttggggtgagagaaagtttcagcatggccaacaacatcatcctctactgtgatactaactcggactctctgcagtcactgaaggaaataatttgccagaagaatactatgtgcactgggaactacacctttgttccttacatgataactccacataacaaagtctactgctgtgacagcagcttcatgaaggggttgacagagctcatgcaaccgaacttcgagctgcttcttggacccatctgcttacctcttgtggatcgttttattcaacttttgaaggtggcacaagcaagttctagccagtacttccgggaatctatactcaatgacatcaggaaagctcgtaatttatacactggtaaagaattggcagctgagttggcaagaattcggcagcgagtagataatatcgaagtcttgacagcagatattgtcataaatctgttactttcctacagagatatccaggactatgattctattgtgaagctggtagagactttagaaaaactgccaacctttgatttggcctcccatcaccatgtgaagtttcattatgcatttgcactgaataggagaaatctccctggtgacagagcaaaagctcttgatattatgattcccatggtgcaaagcgaaggacaagttgcttcagatatgtattgcctagttggtcgaatctacaaagatatgtttttggactctaatttcacggacactgaaagcagagaccatggagcttcttggttcaaaaaggcatttgaatctgagccaacactacagtcaggaattaattatgcggtcctcctcctggcagctggacaccagtttgaatcttcctttgagctccggaaagttggggtgaagctaagtagtcttcttggtaaaaagggaaacttggaaaaactccagagctactgggaagttggattttttctgggggccagcgtcctagccaatgaccacatgagagtcattcaagcatctgaaaagctttttaaactgaagacaccagcatggtacctcaagtctattgtagagacaattttaatatataagcattttgtgaaactgaccacagaacagcctgtggccaagcaagaacttgtggacttttggatggatttcctggtcgaggccacaaagacagatgttactgtggttaggtttccagtattaatattagaaccaaccaaaatctatcaaccttcttatttgtctatcaacaatgaagttgaggaaaagacaatctctatttggcacgtgcttcctgatgacaagaaaggtatacatgagtggaattttagtgcctcttctgtcaggggagtgagtatttctaaatttgaagaaagatgctgctttctttatgtgcttcacaattctgatgatttccaaatctatttctgtacagaacttcattgtaaaaagttttttgagatggtgaacaccattaccgaagagaaggggagaagcacagaggaaggagactgtgaaagtgacttgctggagtatgactatgaatatgatgaaaatggtgacagagtcgttttaggaaaaggcacttatgggatagtctacgcaggtcgggacttgagcaaccaagtcagaattgctattaaggaaatcccagagagagacagcagatactctcagcccctgcatgaagaaatagcattgcataaacacctgaagcacaaaaatattgtccagtatctgggctctttcagtgagaatggtttcattaaaatcttcatggagcaggtccctggaggaagtctttctgctctccttcgttccaaatggggtccattaaaagacaatgagcaaacaattggcttttatacaaagcaaatactggaaggattaaaatatctccatgacaatcagatagttcaccgggacataaagggtgacaatgtgttgattaatacctacagtggtgttctcaagatctctgacttcggaacatcaaagaggcttgctggcataaacccctgtactgaaacttttactggtaccctccagtatatggcaccagaaataatagataaaggaccaagaggctacggaaaagcagcagacatctggtctctgggctgtacaatcattgaaatggccacaggaaaacccccattttatgaactgggagaaccacaagcagctatgttcaaggtgggaatgtttaaagtccaccctgagatcccagagtccatgtctgcagaggccaaggcattcatactgaaatgttttgaaccagatcctgacaagagagcctgtgctaacgacttgcttgttgatgagtttttaaaagtttcaagcaaaaagaaaaagacacaacctaagctttcagctctttcagctggatcaaatgaatatctcaggagtatatccttgccggtacctgtgctggtggaggacaccagcagcagcagtgagtacggctcagtttcacccgacacggagttgaaagtggaccccttctctttcaaaacaagagccaagtcctgcggagaaagagatgtcaagggaattcggacactctttttgggcattccagatgagaattttgaagatcacagtgctcctccttcccctgaagaaaaagattctggattcttcatgctgaggaaggacagtgagaggcgagctacccttcacaggatcctgacggaagaccaagacaaaattgtgagaaacctaatggaatctttagctcagggggctgaagaaccgaaactaaaatgggaacacatcacaaccctcattgcaagcctcagagaatttgtgagatccactgaccgaaaaatcatagccaccacactgtcaaagctgaaactggagctggacttcgacagccatggcattagccaagtccaggtggtactctttggttttcaagatgctgtcaataaagttcttcggaatcataacatcaagccgcactggatgtttgccttagacagtatcattcggaaggcggtacagacagccattaccatcctggttccagaactaaggccacatttcagccttgcatctgagagtgatactgctgatcaagaagacttggatgtagaagatgaccatgaggaacagccttcaaatcaaactgtccgaagacctcaggctgtcattgaagatgctgtggctacctcaggcgtgagcacgctcagttctactgtgtctcatgattcccagagtgctcaccggtcactgaatgtacagcttggaaggatgaaaatagaaaccaatagattactggaagaattggttcggaaagagaaagaattacaagcactccttcatcgagctattgaagaaaaagaccaagaaattaaacacctgaagcttaagtcccaacccatagaaattcctgaattgcctgtatttcatctaaattcttctggcacaaatactgaagattctgaacttaccgactggctgagagtgaatggagctgatgaagacactataagccggtttttggctgaagattatacactattggatgttctctactatgttacacgtgatgacttaaaatgcttgagactaaggggagggatgctgtgcacactgtggaaggctatcattgactttcgaaacaaacagacttga

SEQ ID NO: 24 - DNA, 1527 bp, Homo sapiens
atgtggagcaaactgaataatgaagagcacaatgagctgagggaagtggacggcaccgctaagaagaatggcggcaccctctactacatggcgcccgagcacctgaatgacgtcaacgcaaagcccacagagaagtcggatgtgtacagctttgctgtagtactctgggcgatatttgcaaataaggagccatatgaaaatgctatctgtgagcagcagttgataatgtgcataaaatctgggaacaggccagatgtggatgacatcactgagtactgcccaagagaaattatcagtctcatgaagctctgctgggaagcgaatccggaagctcggccgacatttcctggcattgaagaaaaatttaggcctttttatttaagtcaattagaagaaagtgtagaagaggacgtgaagagtttaaagaaagagtattcaaacgaaaatgcagttgtgaagagaatgcagtctcttcaacttgattgtgtggcagtaccttcaagccggtcaaattcagccacagaacagcctggttcactgcacagttcccagggacttgggatgggtcctgtggaggagtcctggtttgctccttccctggagcacccacaagaagagaatgagcccagcctgcagagtaaactccaagacgaagccaactaccatctttatggcagccgcatggacaggcagacgaaacagcagcccagacagaatgtggcttacaacagagaggaggaaaggagacgcagggtctcccatgacccttttgcacagcaaagaccttacgagaattttcagaatacagagggaaaaggcactgcttattccagtgcagccagtcatggtaatgcagtgcaccagccctcagggctcaccagccaacctcaagtactgtatcagaacaatggattatatagctcacatggctttggaacaagaccactggatccaggaacagcaggtcccagagtttggtacaggccaattccaagtcatatgcctagtctgcataatatcccagtgcctgagaccaactatctaggaaatacacccaccatgccattcagctccttgccaccaacagatgaatctataaaatataccatatacaatagtactggcattcagattggagcctacaattatatggagattggtgggacgagttcatcactactagacagcacaaatacgaacttcaaagaagagccagctgctaagtaccaagctatctttgataataccactagtctgacggataaacacctggacccaatcagggaaaatctgggaaagcactggaaaaactgtgcccgtaaactgggcttcacacagtctcagattgatgaaattgaccatgactatgagcgagatggactgaaagaaaaggtttaccagatgctccaaaagtgggtgatgagggaaggcataaagggagccacggtggggaagctggcccaggcgctccaccagtgttccaggatcgaccttctgagcagcttgatttacgtcagccagaactaa

SEQ ID NO: 25 - DNA, 1974 bp, Homo sapiens
atggacgaacaggaggcattgaactcaatcatgaacgatctggtggccctccagatgaaccgacgtcaccggatgcctggatatgagaccatgaagaacaaagacacaggtcactcaaataggcagaaaaaacacaacagcagcagctcagcccttctgaacagccccacagtaacaacaagctcatgtgcaggggccagtgagaaaaagaaatttttgagtgacgtcagaatcaagttcgagcacaacggggagaggcgaattatagcgttcagccggcctgtgaaatatgaagatgtggagcacaaggtgacaacagtatttggacaacctcttgatctacattacatgaacaatgagctctccatcctgctgaaaaaccaagatgatcttgataaagcaattgacattttagatagaagctcaagcatgaaaagccttaggatattgctgttgtcccaggacagaaaccataacagttcctctccccactctggggtgtccagacaggtgcggatcaaggcttcccagtccgcaggggatataaatactatctaccagccccccgagcccagaagcaggcacctctctgtcagctcccagaaccctggccgaagctcacctccccctggctatgttcctgagcggcagcagcacattgcccggcaggggtcctacaccagcatcaacagtgagggggagttcatcccagagaccagcgagcagtgcatgctggatcccctgagcagtgcagaaaattccttgtctggaagctgccaatccttggacaggtcagcagacagcccatccttccggaaatcacgaatgtcccgtgcccagagcttccctgacaacagacaggaatactcagatcgggaaactcagctttatgacaaaggggtcaaaggtggaacctacccccggcgctaccacgtgtctgtgcaccacaaggactacagtgatggcagaagaacatttccccgaatacggcgtcatcaaggcaacttgttcaccctggtgccctccagccgctccctgagcacaaatggcgagaacatgggtctggctgtgcaatacctggacccccgtgggcgcctgcggagtgcggacagcgagaatgccctctctgtgcaggagaggaatgtgccaaccaagtctcccagtgcccccatcaactggcgccggggaaagctcctgggccagggtgccttcggcagggtctatttgtgctatgacgtggacacgggacgtgaacttgcttccaagcaggtccaatttgatccagacagtcctgagacaagcaaggaggtgagtgctctggagtgcgagatccagttgctaaagaacttgcagcatgagcgcatcgtgcagtactatggctgtctgcgggaccgcgctgagaagaccctgaccatcttcatggagtacatgccagggggctcggtgaaagaccagttgaaggcttacggtgctctgacagagagcgtgacccgaaagtacacgcggcagatcctggagggcatgtcctacctgcacagcaacatgattgttcaccgggacattaagggagccaacatcctccgagactctgctgggaatgtaaagctgggggactttggggccagcaaacgcctgcagacgatctgtatgtcggggacgggcatgcgctccgtcactggcacaccctactggatgagccctgaggtgatcagcggcgagggctatggaaggaaagcagacgtgtggagcctgggctgcactgtggtggagatgctgacagagaaaccaccgtgggcagagtatgaagctatggccgccatcttcaagattgccacccagcccaccaatcctcagctgccctcccacatctctgaacatggccgggacttcctgaggcgcatttttgtggaggctcgccagagaccttcagctgaggagctgctcacacaccactttgcacagctcatgtactga

SEQ ID NO: 26 - DNA, 3867 bp, Homo sapiens
atggcggggccgtgtccccggtccggggcggagcgcgccggcagctgctggcaggacccgctggccgtggcgctgagccggggccggcagctcgcggcgcccccgggccggggctgcgcgcggagccggccgctcagcgtggtctacgtgctgacccgggagccgcagcccgggctcgagcctcgggagggaaccgaggcggagccgctgcccctgcgctgcctgcgcgaggcttgcgcgcaggtcccccggccgcggccgcccccgcagctgcgcagcctgcccttcgggacgctggagctaggcgacaccgcggctctggatgccttctacaacgcggatgtggtggtgctggaggtgagcagctcgctggtacagccctccctgttctaccaccttggtgtgcgtgagagcttcagcatgaccaacaatgtgctcctctgctcccaggccgacctccctgacctgcaggccctgcgggaggatgttttccagaagaactcggattgcgttggcagctacacactgatcccctatgtggtgacggccactggtcgggtgctgtgtggtgatgcaggccttctgcggggcctggctgatgggctggtacaggctggagtggggaccgaggccctgctcactcccctggtgggccggcttgcccgcctgctggaggccacacccacagactcttgtggctatttccgggagaccattcggcgggacatccggcaggcgcgggagcggttcagtgggccacagctgcggcaggagctggctcgcctgcagcggagactggacagcgtggagctgctgagccccgacatcatcatgaacttgctgctctcctaccgcgatgtgcaggactactcggccatcattgagctggtggagacgctgcaggccttgcccacctgtgatgtggccgagcagcataatgtctgcttccactacacttttgccctcaaccggaggaacaggcctggggaccgggcgaaggccctgtctgtgctgctgccgctggtacagcttgagggctctgtggcgcccgatctgtactgcatgtgtggccgtatctacaaggacatgttcttcagctcgggtttccaggatgctgggcaccgggagcaggcctatcactggtatcgcaaggcttttgacgtagagcccagccttcactcaggcatcaatgcagctgtgctcctcattgctgccgggcagcactttgaggattccaaagagctccggctaataggcatgaagctgggctgcctgctggcccgcaaaggctgcgtggagaagatgcagtattactgggatgtgggtttctacctgggagcccagatcctcgccaatgaccccacccaggtggtgctggctgcagagcagctgtataagctcaatgcccccatatggtacctggtgtccgtgatggagaccttcctgctctaccagcacttcaggcccacgccagagccccctggagggccaccacgccgtgcccacttctggctccacttcttgctacagtcctgccaaccattcaagacagcctgtgcccagggcgaccagtgcttggtgctggtcctggagatgaacaaggtgctgctgcctgcaaagctcgaggttcggggtactgacccagtaagcacagtgaccctgagcctgctggagcctgagacccaggacattccctccagctggaccttcccagtcgcctccatatgcggagtcagcgcctcaaagcgcgacgagcgctgctgcttcctctatgcactccccccggctcaggacgtccagctgtgcttccccagcgtagggcactgccagtggttctgcggcctgatccaggcctgggtgacgaacccggattccacggcgcccgcggaggaggcggagggcgcgggggagatgttggagtttgattatgagtacacggagacgggcgagcggctggtgctgggcaagggcacgtatggggtggtgtacgcgggccgcgatcgccacacgagggtgcgcatcgccatcaaggagatcccggagcgggacagcaggttctctcagcccctgcatgaagagatcgctcttcacagacgcctgcgccacaagaacatagtgcgctatctgggctcagctagccagggcggctaccttaagatcttcatggaggaagtgcctggaggcagcctgtcctccttgctgcggtcggtgtggggacccctgaaggacaacgagagcaccatcagtttctacacccgccagatcctgcagggacttggctacttgcacgacaaccacatcgtgcacagggacataaaaggggacaatgtgctgatcaacaccttcagtgggctgctcaagatttctgacttcggcacctccaagcggctggcaggcatcacaccttgcactgagaccttcacaggaactctgcagtatatggccccagaaatcattgaccagggcccacgcgggtatgggaaagcagctgacatctggtcactgggctgcactgtcattgagatggccacaggtcgcccccccttccacgagctcgggagcccacaggctgccatgtttcaggtgggtatgtacaaggtccatccgccaatgcccagctctctgtcggccgaggcccaagcctttctcctccgaacttttgagccagacccccgcctccgagccagcgcccagacactgctgggggaccccttcctgcagcctgggaaaaggagccgcagccccagctccccacgacatgctccacggccctcagatgccccttctgccagtcccactccttcagccaactcaaccacccagtctcagacattcccgtgccctcaggcaccctctcagcacccacccagccccccgaagcgctgcctcagttatgggggcaccagccagctccgggtgcccgaggagcctgcggccgaggagcctgcgtctccggaggagagttcggggctgagcctgctgcaccaggagagcaagcgtcgggccatgctggccgcagtattggagcaggagctgccagcgctggcggagaatctgcaccaggagcagaagcaagagcagggggcccgtctgggcagaaaccatgtggaagagctgctgcgctgcctcggggcacacatccacactcccaaccgccggcagctcgcccaggagctgcgggcgctgcaaggacggctgagggcccagggccttgggcctgcgcttctgcacagaccgctgtttgccttcccggatgcggtgaagcagatcctccgcaagcgccagatccgtccacactggatgttcgttctggactcactgctcagccgtgctgtgcgggcagccctgggtgtgctaggaccggaggtggagaaggaggcggtctcaccgaggtcagaggagctgagtaatgaaggggactcccagcagagcccaggccagcagagcccgcttccggtggagcccgagcagggccccgctcctctgatggtgcagctgagcctcttgagggcagagactgatcggctgcgcgaaatcctggcggggaaggaacgggagtaccaggccctggtgcagcgggctctacagcggctgaatgaggaagcccggacctatgtcctggccccagagcctccaactgctctttcaacggaccagggcctggtgcagtggctacaggaactgaatgtggattcaggcaccatccaaatgctgttgaaccatagcttcaccctccacactctgctcacctatgccactcgagatgacctcatctacacccgcatcaggggagggatggtatgccgcatctggagggccatcttggcacagcgagcaggatccacaccagtcacctctggaccctga

SEQ ID NO: 27 - DNA, 2844 bp, Homo sapiens
atggcagtgatggaaatggcctgcccaggtgcccctggctcagcagtggggcagcagaaggaactccccaaagccaaggagaagacgccgccactggggaagaaacagagctccgtctacaagcttgaggccgtggagaagagccctgtgttctgcggaaagtgggagatcctgaatgacgtgattaccaagggcacagccaaggaaggctccgaggcagggccagctgccatctctatcatcgcccaggctgagtgtgagaatagccaagagttcagccccaccttttcagaacgcattttcatcgctgggtccaaacagtacagccagtccgagagtcttgatcagatccccaacaatgtggcccatgctacagagggcaaaatggcccgtgtgtgttggaagggaaagcgtcgcagcaaagcccggaagaaacggaagaagaagagctcaaagtccctggctcatgcaggagtggccttggccaaacccctccccaggacccctgagcaggagagctgcaccatcccagtgcaggaggatgagtctccactcggcgccccatatgttagaaacaccccgcagttcaccaagcctctgaaggaaccaggccttgggcaactctgttttaagcagcttggcgagggcctacggccggctctgcctcgatcagaactccacaaactgatcagccccttgcaatgtctgaaccacgtgtggaaactgcaccacccccaggacggaggccccctgcccctgcccacgcaccccttcccctatagcagactgcctcatcccttcccattccaccctctccagccctggaaacctcaccctctggagtccttcctgggcaaactggcctgtgtagacagccagaaacccttgcctgacccacacctgagcaaactggcctgtgtagacagtccaaagcccctgcctggcccacacctggagcccagctgcctgtctcgtggtgcccatgagaagttttctgtggaggaatacctagtgcatgctctgcaaggcagcgtgagctcaggccaggcccacagcctgaccagcctggccaagacctgggcagcaaggggctccagatcccgggagcccagccccaaaactgaggacaacgagggtgtcctgctcactgagaaactcaagccagtggattatgagtaccgagaagaagtccactgggccacgcaccagctccgcctgggcagaggctccttcggagaggtgcacaggatggaggacaagcagactggcttccagtgcgctgtcaaaaaggtgcggctggaagtatttcgggcagaggagctgatggcatgtgcaggattgacctcacccagaattgtccctttgtatggagctgtgagagaagggccttgggtcaacatcttcatggagctgctggaaggtggctccctgggccagctggtcaaggagcagggctgtctcccagaggaccgggccctgtactacctgggccaggccctggagggtctggaatacctccactcacgaaggattctgcatggggacgtcaaagctgacaacgtgctcctgtccagcgatgggagccacgcagccctctgtgactttggccatgctgtgtgtcttcaacctgatggcctgggaaagtccttgctcacaggggactacatccctggcacagagacccacatggctccggaggtggtgctgggcaggagctgcgacgccaaggtggatgtctggagcagctgctgtatgatgctgcacatgctcaacggctgccacccctggactcagttcttccgagggccgctctgcctcaagattgccagcgagcctccgcctgtgagggagatcccaccctcctgcgcccctctcacagcccaggccatccaagaggggctgaggaaagagcccatccaccgcgtgtctgcagcggagctgggagggaaggtgaaccgggcactacagcaagtgggaggtctgaagagcccttggaggggagaatataaagaaccaagacatccaccgccaaatcaagccaattaccaccagaccctccatgcccagccgagagagctttcgccaagggccccagggccccggccagctgaggagacaacaggcagagcccctaagctccagcctcctctcccaccagagcccccagagccaaacaagtctcctcccttgactttgagcaaggaggagtctgggatgtgggaacccttacctctgtcctccctggagccagcccctgccagaaaccccagctcaccagagcggaaagcaaccgtcccggagcaggaactgcagcagctggaaatagaattattcctcaacagcctgtcccagccattttctctggaggagcaggagcaaattctctcgtgcctcagcatcgacagcctctccctgtcggatgacagtgagaagaacccatcaaaggcctctcaaagctcgcgggacaccctgagctcaggcgtacactcctggagcagccaggccgaggctcgaagctccagctggaacatggtgctggcccgggggcggcccaccgacaccccaagctatttcaatggtgtgaaagtccaaatacagtctcttaatggtgaacacctgcacatccgggagttccaccgggtcaaagtgggagacatcgccactggcatcagcagccagatcccagctgcagccttcagcttggtcaccaaagacgggcagcctgttcgctacgacatggaggtgccagactcgggcatcgacctgcagtgcacactggcccctgatggcagcttcgcctggagctggagggtcaagcatggccagctggagaacaggccctaa

SEQ ID NO: 28 - DNA, 2265 bp, Homo sapiens
atgttttcaggggggtgtcatagccccgggtttggccgccccagccccgccttccccgccccggggagcccgccccctgccccgcgtccctgccgacaggaaacaggtgagcagattgccatcaagcagtgccggcaggagctcagcccccggaaccgagagcggtggtgcctggagatccagatcatgagaaggctgacccaccccaatgtggtggctgcccgagatgtccctgaggggatgcagaacttggcgcccaatgacctgcccctgctggccatggagtactgccaaggaggagatctccggaagtacctgaaccagtttgagaactgctgtggtctgcgggaaggtgccatcctcaccttgctgagtgacattgcctctgcgcttagataccttcatgaaaacagaatcatccatcgggatctaaagccagaaaacatcgtcctgcagcaaggagaacagaggttaatacacaaaattattgacctaggatatgccaaggagctggatcagggcagtctttgcacatcattcgtggggaccctgcagtacctggccccagagctactggagcagcagaagtacacagtgaccgtcgactactggagcttcggcaccctggcctttgagtgcatcacgggcttccggcccttcctccccaactggcagcccgtgcagtggcattcaaaagtgcggcagaagagtgaggtggacattgttgttagcgaagacttgaatggaacggtgaagttttcaagctctttaccctaccccaataatcttaacagtgtcctggctgagcgactggagaagtggctgcaactgatgctgatgtggcacccccgacagaggggcacggatcccacgtatgggcccaatggctgcttcaaggccctggatgacatcttaaacttaaagctggttcatatcttgaacatggtcacgggcaccatccacacctaccctgtgacagaggatgagagtctgcagagcttgaaggccagaatccaacaggacacgggcatcccagaggaggaccaggagctgctgcaggaagcgggcctggcgttgatccccgataagcctgccactcagtgtatttcagacggcaagttaaatgagggccacacattggacatggatcttgtttttctctttgacaacagtaaaatcacctatgagactcagatctccccacggccccaacctgaaagtgtcagctgtatccttcaagagcccaagaggaatctcgccttcttccagctgaggaaggtgtggggccaggtctggcacagcatccagaccctgaaggaagattgcaaccggctgcagcagggacagcgagccgccatgatgaatctcctccgaaacaacagctgcctctccaaaatgaagaattccatggcttccatgtctcagcagctcaaggccaagttggatttcttcaaaaccagcatccagattgacctggagaagtacagcgagcaaaccgagtttgggatcacatcagataaactgctgctggcctggagggaaatggagcaggctgtggagctctgtgggcgggagaacgaagtgaaactcctggtagaacggatgatggctctgcagaccgacattgtggacttacagaggagccccatgggccggaagcaggggggaacgctggacgacctagaggagcaagcaagggagctgtacaggagactaagggaaaaacctcgagaccagcgaactgagggtgacagtcaggaaatggtacggctgctgcttcaggcaattcagagcttcgagaagaaagtgcgagtgatctatacgcagctcagtaaaactgtggtttgcaagcagaaggcgctggaactgttgcccaaggtggaagaggtggtgagcttaatgaatgaggatgagaagactgttgtccggctgcaggagaagcggcagaaggagctctggaatctcctgaagattgcttgtagcaaggtccgtggtcctgtcagtggaagcccggatagcatgaatgcctctcgacttagccagcctgggcagctgatgtctcagccctccacggcctccaacagcttacctgagccagccaagaagagtgaagaactggtggctgaagcacataacctctgcaccctgctagaaaatgccatacaggacactgtgagggaacaagaccagagtttcacggccctagactggagctggttacagacggaagaagaagagcacagctgcctggagcaggcctcatga

SEQ ID NO: 29 - DNA, 2907 bp, Homo sapiens
atggcagaagatgatccatatttgggaaggcctgaacaaatgtttcatttggatccttctttgactcatacaatatttaatccagaagtatttcaaccacagatggcactgccaacagatggcccataccttcaaatattagagcaacctaaacagagaggatttcgtttccgttatgtatgtgaaggcccatcccatggtggactacctggtgcctctagtgaaaagaacaagaagtcttaccctcaggtcaaaatctgcaactatgtgggaccagcaaaggttattgttcagttggtcacaaatggaaaaaatatccacctgcatgcccacagcctggtgggaaaacactgtgaggatgggatctgcactgtaactgctggacccaaggacatggtggtcggcttcgcaaacctgggtatacttcatgtgacaaagaaaaaagtatttgaaacactggaagcacgaatgacagaggcgtgtataaggggctataatcctggactcttggtgcaccctgaccttgcctatttgcaagcagaaggtggaggggaccggcagctgggagatcgggaaaaagagctaatccgccaagcagctctgcagcagaccaaggagatggacctcagcgtggtgcggctcatgtttacagcttttcttccggatagcactggcagcttcacaaggcgcctggaacccgtggtatcagacgccatctatgacagtaaagcccccaatgcatccaacttgaaaattgtaagaatggacaggacagctggatgtgtgactggaggggaggaaatttatcttctttgtgacaaagttcagaaagatgacatccagattcgattttatgaagaggaagaaaatggtggagtctgggaaggatttggagatttttcccccacagatgttcatagacaatttgccattgtcttcaaaactccaaagtataaagatattaatattacaaaaccagcctctgtgtttgtccagcttcggaggaaatctgacttggaaactagtgaaccaaaacctttcctctactatcctgaaatcaaagataaagaagaagtgcagaggaaacgtcagaagctcatgcccaatttttcggatagtttcggcggtggtagtggtgctggagctggaggcggaggcatgtttggtagtggcggtggaggagggggcactggaagtacaggtccagggtatagcttcccacactatggatttcctacttatggtgggattactttccatcctggaactactaaatctaatgctgggatgaagcatggaaccatggacactgaatctaaaaaggaccctgaaggttgtgacaaaagtgatgacaaaaacactgtaaacctctttgggaaagttattgaaaccacagagcaagatcaggagcccagcgaggccaccgttgggaatggtgaggtcactctaacgtatgcaacaggaacaaaagaagagagtgctggagttcaggataacctctttctagagaaggctatgcagcttgcaaagaggcatgccaatgcccttttcgactacgcggtgacaggagacgtgaagatgctgctggccgtccagcgccatctcactgctgtgcaggatgagaatggggacagtgtcttacacttagcaatcatccaccttcattctcaacttgtgagggatctactagaagtcacatctggtttgatttctgatgacattatcaacatgagaaatgatctgtaccagacgcccttgcacttggcagtgatcactaagcaggaagatgtggtggaggatttgctgagggctggggccgacctgagccttctggaccgcttgggtaactctgttttgcacctagctgccaaagaaggacatgataaagttctcagtatcttactcaagcacaaaaaggcagcactacttcttgaccaccccaacggggacggtctgaatgccattcatctagccatgatgagcaatagcctgccatgtttgctgctgctggtggccgctggggctgacgtcaatgctcaggagcagaagtccgggcgcacagcactgcacctggctgtggagcacgacaacatctcattggcaggctgcctgctcctggagggtgatgcccatgtggacagtactacctacgatggaaccacacccctgcatatagcagctgggagagggtccaccaggctggcagctcttctcaaagcagcaggagcagatcccctggtggagaactttgagcctctctatgacctggatgactcttgggaaaatgcaggagaggatgaaggagttgtgcctggaaccacgcctctagatatggccaccagctggcaggtatttgacatattaaatgggaaaccatatgagccagagtttacatctgatgatttactagcacaaggagacatgaaacagctggctgaagatgtgaagctgcagctgtataagttactagaaattcctgatccagacaaaaactgggctactctggcgcagaaattaggtctggggatacttaataatgccttccggctgagtcctgctccttccaaaacacttatggacaactatgaggtctctgggggtacagtcagagagctggtggaggccctgagacaaatgggctacaccgaagcaattgaagtgatccaggcagcctccagcccagtgaagaccacctctcaggcccactcgctgcctctctcgcctgcctccacaaggcagcaaatagacgagctccgagacagtgacagtgtctgcgacagcggcgtggagacatccttccgcaaactcagctttaccgagtctctgaccagtggtgcctcactgctaactctcaacaaaatgccccatgattatgggcaggaaggacctctagaaggcaaaatttag

SEQ ID NO: 30 - DNA, 1128 bp, Homo sapiens
atggagcgcgcgtcctgcttgttgctgctgctgctgccgctggtgcacgtctctgcgaccacgccagaaccttgtgagctggacgatgaagatttccgctgcgtctgcaacttctccgaacctcagcccgactggtccgaagccttccagtgtgtgtctgcagtagaggtggagatccatgccggcggtctcaacctagagccgtttctaaagcgcgtcgatgcggacgccgacccgcggcagtatgctgacacggtcaaggctctccgcgtgcggcggctcacagtgggagccgcacaggttcctgctcagctactggtaggcgccctgcgtgtgctagcgtactcccgcctcaaggaactgacgctcgaggacctaaagataaccggcaccatgcctccgctgcctctggaagccacaggacttgcactttccagcttgcgcctacgcaacgtgtcgtgggcgacagggcgttcttggctcgccgagctgcagcagtggctcaagccaggcctcaaggtactgagcattgcccaagcacactcgcctgccttttcctgcgaacaggttcgcgccttcccggcccttaccagcctagacctgtctgacaatcctggactgggcgaacgcggactgatggcggctctctgtccccacaagttcccggccatccagaatctagcgctgcgcaacacaggaatggagacgcccacaggcgtgtgcgccgcactggcggcggcaggtgtgcagccccacagcctagacctcagccacaactcgctgcgcgccaccgtaaaccctagcgctccgagatgcatgtggtccagcgccctgaactccctcaatctgtcgttcgctgggctggaacaggtgcctaaaggactgccagccaagctcagagtgctcgatctcagctgcaacagactgaacagggcgccgcagcctgacgagctgcccgaggtggataacctgacactggacgggaatcccttcctggtccctggaactgccctcccccacgagggctcaatgaactccggcgtggtcccagcctgtgcacgttcgaccctgtcggtgggggtgtcgggaaccctggtgctgctccaaggggcccggggctttgcctaa

SEQ ID NO: 31 - DNA, 480 bp, Homo sapiens
atgcgacccgaccgcgctgaggctccaggaccgcccgccatggctgcaggaggtcccggcgcggggtctgcggccccggtctcctccacatcctcccttcccctggctgctctcaacatgcgagtgcggcgccgcctgtctctgttcttgaacgtgcggacacaggtggcggccgactggaccgcgctggcggaggagatggactttgagtacttggagatccggcaactggagacacaagcggaccccactggcaggctgctggacgcctggcagggacgccctggcgcctctgtaggccgactgctcgagctgcttaccaagctgggccgcgacgacgtgctgctggagctgggacccagcattggtgccgccggatggtggtggttgtctctgatgattacctgcagagcaaggaatgtgacttccagaccaaatttgcactcagcctctctccaggtgcccatcagaagcgactga

SEQ ID NO: 32 - DNA, 2049 bp, Homo sapiens
atggccggggggccgggcccgggggagcccgcagcccccggcgcccagcacttcttgtacgaggtgccgccctgggtcatgtgccgcttctacaaagtgatggacgccctggagcccgccgactggtgccagttcgccgccctgatcgtgcgcgaccagaccgagctgcggctgtgcgagcgctccgggcagcgcacggccagcgtcctgtggccctggatcaaccgcaacgcccgtgtggccgacctcgtgcacatcctcacgcacctgcagctgctccgtgcgcgggacatcatcacagcctggcaccctcccgccccgcttccgtccccaggcaccactgccccgaggcccagcagcatccctgcacccgccgaggccgaggcctggagcccccggaagttgccatcctcagcctccaccttcctctccccagcttttccaggctcccagacccattcagggcctgagctcggcctggtcccaagccctgcttccctgtggcctccaccgccatctccagccccttcttctaccaagccaggcccagagagctcagtgtccctcctgcagggagcccgcccctttccgttttgctggcccctctgtgagatttcccggggcacccacaacttctcggaggagctcaagatcggggagggtggctttgggtgcgtgtaccgggcggtgatgaggaacacggtgtatgctgtgaagaggctgaaggagaacgctgacctggagtggactgcagtgaagcagagcttcctgaccgaggtggagcagctgtccaggtttcgtcacccaaacattgtggactttgctggctactgtgctcagaacggcttctactgcctggtgtacggcttcctgcccaacggctccctggaggaccgtctccactgccagacccaggcctgcccacctctctcctggcctcagcgactggacatccttctgggtacagcccgggcaattcagtttctacatcaggacagccccagcctcatccatggagacatcaagagttccaacgtccttctggatgagaggctgacacccaagctgggagactttggcctggcccggttcagccgctttgccgggtccagccccagccagagcagcatggtggcccggacacagacagtgcggggcaccctggcctacctgcccgaggagtacatcaagacgggaaggctggctgtggacacggacaccttcagctttggggtggtagtgctagagaccttggctggtcagagggctgtgaagacgcacggtgccaggaccaagtatctgaaagacctggtggaagaggaggctgaggaggctggagtggctttgagaagcacccagagcacactgcaagcaggtctggctgcagatgcctgggctgctcccatcgccatgcagatctacaagaagcacctggaccccaggcccgggccctgcccacctgagctgggcctgggcctgggccagctggcctgctgctgcctgcaccgccgggccaaaaggaggcctcctatgacccaggagaactcctacgtgtccagcactggcagagcccacagtggggctgctccatggcagcccctggcagcgccatcaggagccagtgcccaggcagcagagcagctgcagagaggccccaaccagcccgtggagagtgacgagagcctaggcggcctctctgctgccctgcgctcctggcacttgactccaagctgccctctggacccagcacccctcagggaggccggctgtcctcagggggacacggcaggagaatcgagctgggggagtggcccaggatcccggcccacagccgtggaaggactggcccttggcagctctgcatcatcgtcgtcagagccaccgcagattatcatcaaccctgcccgacagaagatggtccagaagctggccctgtacgaggatggggccctggacagcctgcagctgctgtcgtccagctccctcccaggcttgggcctggaacaggacaggcaggggcccgaagaaagtgatgaatttcagagctga

SEQ ID NO: 33 - DNA, 1446 bp, Homo sapiens
atgggggccttggccagagccctgccgtccatactgctggcattgctgcttacgtccaccccagaggctctgggtgccaaccccggcttggtcgccaggatcaccgacaagggactgcagtatgcggcccaggaggggctattagctctgcagagtgagctgctcaggatcacgctgcctgacttcaccggggacttgaggatcccccacgtcggccgtgggcgctatgagttccacagcctgaacatccacagctgtgagctgcttcactctgcgctgaggcctgtccctggccagggcctgagtctcagcatctccgactcctccatccgggtccagggcaggtggaaggtgcgcaagtcattcttcaaactacagggctcctttgatgtcagtgtcaagggcatcagcatttcggtcaacctcctgttgggcagcgagtcctccgggaggcccacagttactgcctccagctgcagcagtgacatcgctgacgtggaggtggacatgtcgggagacttggggtggctgttgaacctcttccacaaccagattgagtccaagttccagaaagtactggagagcaggatttgcgaaatgatccagaaatcagtgtcctccgatctacagccttatctccaaactctgccagttacaacagagattgacagtttcgccgacattgattatagcttagtggaagcccctcgggcaacagcccagatgctggaggtgatgtttaagggtgaaatctttcatcgtaaccaccgttctccagttaccctccttgctgcagtcatgagccttcctgaggaacacaacaaaatggtctactttgccatctcggattatgtcttcaacacggccagcctggtttatcatgaggaaggatatctgaacttctccatcacagatgacatgataccgcctgactctaatatccgactgaccaccaagtccttccgacccttcgtcccacggttagccaggctctaccccaacatgaacctggaactccagggatcagtgccctctgctccgctcctgaacttcagccctgggaatctgtctgtggacccctatatggagatagatgcctttgtgctcctgcccagctccagcaaggagcctgtcttccggctcagtgtggccactaatgtgtccgccaccttgaccttcaataccagcaagatcactgggttcctgaagccaggaaaggtaaaagtggaactgaaagaatccaaagttggactattcaatgcagagctgttggaagcgctcctcaactattacatccttaacaccttctaccccaagttcaatgataagttggccgaaggcttcccccttcctctgctgaagcgtgttcagctctacgaccttgggctgcagatccataaggacttcctgttcttgggtgccaatgtccaatacatgagagtttga

SEQ ID NO: 34 - DNA, 1569 bp, Homo sapiens
atgagtctgctaaactgtgaaaacagctgtggatccagccagtctgaaagtgactgctgtgtggccatggccagctcctgtagcgctgtaacaaaagatgatagtgtgggtggaactgccagcacggggaacctctccagctcatttatggaggagatccagggatatgatgtagagtttgacccacccctggaaagcaagtatgaatgccccatctgcttgatggcattacgagaagcagtgcaaacgccatgcggccataggttctgcaaagcctgcatcataaaatcaataagggatgcaggtcacaaatgtccagttgacaatgaaatactgctggaaaatcaactatttccagacaattttgcaaaacgtgagattctttctctgatggtgaaatgtccaaatgaaggttgtttgcacaagatggaactgagacatcttgaggatcatcaagcacattgtgagtttgctcttatggattgtccccaatgccagcgtcccttccaaaaattccatattaatattcacattctgaaggattgtccaaggagacaggtttcttgtgacaactgtgctgcatcaatggcatttgaagataaagagatccatgaccagaactgtcctttggcaaatgtcatctgtgaatactgcaatactatactcatcagagaacagatgcctaatcattatgatctagactgccctacagccccaattccatgcacattcagtacttttggttgccatgaaaagatgcagaggaatcacttggcacgccacctacaagagaacacccagtcacacatgagaatgttggcccaggctgttcatagtttgagcgttatacccgactctgggtatatctcagaggtccggaatttccaggaaactattcaccagttagagggtcgccttgtaagacaagaccatcaaatccgggagctgactgctaaaatggaaactcagagtatgtatgtaagtgagctcaaacgaaccattcgaacccttgaggacaaagttgctgaaatcgaagcacagcagtgcaatggaatttatatttggaagattggcaactttggaatgcatttgaaatgtcaagaagaggagaaacctgttgtgattcatagccctggattctacactggcaaacccgggtacaaactgtgcatgcgcttgcaccttcagttaccgactgctcagcgctgtgcaaactatatatccctttttgtccacacaatgcaaggagaatatgacagccacctcccttggcccttccagggtacaatacgccttacaattcttgatcagtctgaagcacctgtaaggcaaaaccacgaagagataatggatgccaaaccagagctgcttgctttccagcgacccacaatcccacggaacccaaaaggttttggctatgtaacttttatgcatctggaagccctaagacaaagaactttcattaaggatgacacattattagtgcgctgtgaggtctccacccgctttgacatgggtagccttcggagggagggttttcagccacgaagtactgatgcaggggtatag

SEQ ID NO: 35 - DNA, 567 bp, Homo sapiens
atgactgaatataaacttgtggtagttggagctggtggcgtaggcaagagtgccttgacgatacagctaattcagaatcattttgtggacgaatatgatccaacaatagaggattcctacaggaagcaagtagtaattgatggagaaacctgtctcttggatattctcgacacagcaggtcaagaggagtacagtgcaatgagggaccagtacatgaggactggggagggctttctttgtgtatttgccataaataatactaaatcatttgaagatattcaccattatagagaacaaattaaaagagttaaggactctgaagatgtacctatggtcctagtaggaaataaatgtgatttgccttctagaacagtagacacaaaacaggctcaggacttagcaagaagttatggaattccttttattgaaacatcagcaaagacaagacagggtgttgatgatgccttctatacattagttcgagaaattcgaaaacataaagaaaagatgagcaaagatggtaaaaagaagaaaaagaagtcaaagacaaagtgtgtaattatgtaa

SEQ ID NO: 36 - DNA, 570 bp, Homo sapiens
atgactgagtacaaactggtggtggttggagcaggtggtgttgggaaaagcgcactgacaatccagctaatccagaaccactttgtagatgaatatgatcccaccatagaggattcttacagaaaacaagtggttatagatggtgaaacctgtttgttggacatactggatacagctggacaagaagagtacagtgccatgagagaccaatacatgaggacaggcgaaggcttcctctgtgtatttgccatcaataatagcaagtcatttgcggatattaacctctacagggagcagattaagcgagtaaaagactcggatgatgtacctatggtgctagtgggaaacaagtgtgatttgccaacaaggacagttgatacaaaacaagcccacgaactggccaagagttacgggattccattcattgaaacctcagccaagaccagacagggtgttgaagatgctttttacacactggtaagagaaatacgccagtaccgaatgaaaaaactcaacagcagtgatgatgggactcagggttgtatgggattgccatgtgtggtgatgtaa

SEQ ID NO: 37 - DNA, 2514 bp, Homo sapiens
atggctagcaaacgaaaatctacaactccatgcatggttcggacatcacaagtagtagaacaagatgtgcccgaggaagtagacagggccaaagagaaaggaatcggcacaccacagcctgacgtggccaaggacagttgggcagcagaacttgaaaactcttccaaagaaaacgaagtgatagaggtgaaatctatgggggaaagccagtccaaaaaactccaaggtggttatgagtgcaaatactgcccctactccacgcaaaacctgaacgagttcacggagcatgtcgacatgcagcatcccaacgtgattctcaaccccctctacgtgtgtgcagaatgtaacttcacaaccaaaaagtacgactccctatccgaccacaactccaagttccatcccggggaggccaacttcaagctgaagttaattaaacgcaataatcaaactgtcttggaacagtccatcgaaaccaccaaccatgtcgtgtccatcaccaccagtggccctggaactggtgacagtgattctgggatctcggtgagtaaaacccccatcatgaagcctggaaaaccaaaagcggatgccaagaaggtgcccaagaagcccgaggagatcacccccgagaaccacgtggaagggaccgcccgcctggtgacagacacagctgagatcctctcgagactcggcggggtggagctcctccaagacacattaggacacgtcatgccttctgtacagctgccaccaaatatcaaccttgtgcccaaggtccctgtcccactaaatactaccaaatacaactctgccctggatacaaatgccacgatgatcaactctttcaacaagtttccttacccgacccaggctgagttgtcctggctgacagctgcctccaaacacccagaggagcacatcagaatctggtttgccacccagcgcttaaagcatggcatcagctggtccccagaagaggtggaggaggcccggaagaagatgttcaacggcaccatccagtcagtacccccgaccatcactgtgctgcccgcccagttggcccccacaaaggtgacgcagcccatcctccagacggctctaccgtgccagatcctcggccagactagcctggtgctgactcaggtgaccagcgggtcaacaaccgtctcttgctcccccatcacacttgccgtggcaggagtcaccaaccatggccagaagagacccttggtgactccccaagctgcccccgaacccaagcgtccacacatcgctcaggtgccagagcccccacccaaggtggccaaccccccgctcacaccagccagtgaccgcaagaagacaaaggagcagatagcacatctcaaggccagctttctccagagccagttccctgacgatgccgaggtttaccggctcatcgaggtgactggccttgccaggagcgagatcaagaagtggttcagtgaccaccgatatcggtgtcaaaggggcatcgtccacatcaccagcgaatcccttgccaaagaccagttggccatcgcggcctcccgacacggtcgcacgtatcatgcgtacccagactttgccccccagaagttcaaagagaaaacacagggtcaggttaaaatcttggaagacagctttttgaaaagttcttttcctacccaagcagaactggatcggctaagggtggagaccaagctgagcaggagagagatcgactcctggttctcggagaggcggaagcttcgagacagcatggaacaagctgtcttggattccatggggtctggcaaaaaaggccaagatgtgggagcccccaatggtgctctgtctcgactcgaccagctctccggtgcccagttaacaagttctctgcccagcccttcgccagcaattgcaaaaagtcaagaacaggttcatctcctgaggagcacgtttgcaagaacccagtggcctactccccaggagtacgaccagttagcggccaagactggcctggtccgaactgagattgtgcgttggttcaaggagaacagatgcttgctgaaaacgggaaccgtgaagtggatggagcagtaccagcaccagcccatggcagatgatcacggctacgatgccgtagcaaggaaagcaacaaaacccatggccgagagcccaaagaacgggggtgatgtggttccacaatattacaaggaccccaaaaagctctgcgaagaggacttggagaagttggtgaccagggtaaaagtaggcagcgagccagcaaaagactgtttgccagcaaagccctcagaggccacctcagaccggtcagagggcagcagccgggacggccagggtagcgacgagaacgaggagtcgagcgttgtggattacgtggaggtgacggtcggggaggaggatgcgatctcagatagatcagatagctggagtcaggctgcggcagaaggtgtgtcggaactggctgaatcagactccgactgcgtccctgcagaggctggccaggcctag

SEQ ID NO: 38 - DNA, 1182 bp, Homo sapiens
atgcccaagaagaagccgacgcccatccagctgaacccggcccccgacggctctgcagttaacgggaccagctctgcggagaccaacttggaggccttgcagaagaagctggaggagctagagcttgatgagcagcagcgaaagcgccttgaggcctttcttacccagaagcagaaggtgggagaactgaaggatgacgactttgagaagatcagtgagctgggggctggcaatggcggtgtggtgttcaaggtctcccacaagccttctggcctggtcatggccagaaagctaattcatctggagatcaaacccgcaatccggaaccagatcataagggagctgcaggttctgcatgagtgcaactctccgtacatcgtgggcttctatggtgcgttctacagcgatggcgagatcagtatctgcatggagcacatggatggaggttctctggatcaagtcctgaagaaagctggaagaattcctgaacaaattttaggaaaagttagcattgctgtaataaaaggcctgacatatctgagggagaagcacaagatcatgcacagagatgtcaagccctccaacatcctagtcaactcccgtggggagatcaagctctgtgactttggggtcagcgggcagctcatcgactccatggccaactccttcgtgggcacaaggtcctacatgtcgccagaaagactccaggggactcattactctgtgcagtcagacatctggagcatgggactgtctctggtagagatggcggttgggaggtatcccatccctcctccagatgccaaggagctggagctgatgtttgggtgccaggtggaaggagatgcggctgagaccccacccaggccaaggacccccgggaggccccttagctcatacggaatggacagccgacctcccatggcaatttttgagttgttggattacatagtcaacgagcctcctccaaaactgcccagtggagtgttcagtctggaatttcaagattttgtgaataaatgcttaataaaaaaccccgcagagagagcagatttgaagcaactcatggttcatgcttttatcaagagatctgatgctgaggaagtggattttgcaggttggctctgctccaccatcggccttaaccagcccagcacaccaacccatgctgctggcgtctaa

SEQ ID NO: 39 - DNA, 1203 bp, Homo sapiens
atgctggcccggaggaagccggtgctgccggcgctcaccatcaaccctaccatcgccgagggcccatcccctaccagcgagggcgcctccgaggcaaacctggtggacctgcagaagaagctggaggagctggaacttgacgagcagcagaagaagcggctggaagcctttctcacccagaaagccaaggtcggcgaactcaaagacgatgacttcgaaaggatctcagagctgggcgcgggcaacggcggggtggtcaccaaagtccagcacagaccctcgggcctcatcatggccaggaagctgatccaccttgagatcaagccggccatccggaaccagatcatccgcgagctgcaggtcctgcacgaatgcaactcgccgtacatcgtgggcttctacggggccttctacagtgacggggagatcagcatttgcatggaacacatggacggcggctccctggaccaggtgctgaaagaggccaagaggattcccgaggagatcctggggaaagtcagcatcgcggttctccggggcttggcgtacctccgagagaagcaccagatcatgcaccgagatgtgaagccctccaacatcctcgtgaactctagaggggagatcaagctgtgtgacttcggggtgagcggccagctcatcgactccatggccaactccttcgtgggcacgcgctcctacatggctccggagcggttgcagggcacacattactcggtgcagtcggacatctggagcatgggcctgtccctggtggagctggccgtcggaaggtaccccatccccccgcccgacgccaaagagctggaggccatctttggccggcccgtggtcgacggggaagaaggagagcctcacagcatctcgcctcggccgaggccccccgggcgccccgtcagcggtcacgggatggatagccggcctgccatggccatctttgaactcctggactatattgtgaacgagccacctcctaagctgcccaacggtgtgttcacccccgacttccaggagtttgtcaataaatgcctcatcaagaacccagcggagcgggcggacctgaagatgctcacaaaccacaccttcatcaagcggtccgaggtggaagaagtggattttgccggctggttgtgtaaaaccctgcggctgaaccagcccggcacacccacgcgcaccgccgtgtga

SEQ ID NO: 40 - DNA, 1074 bp, Homo sapiens
atggcggcggcggcggctcaggggggcgggggcggggagccccgtagaaccgagggggtcggcccgggggtcccgggggaggtggagatggtgaaggggcagccgttcgacgtgggcccgcgctacacgcagttgcagtacatcggcgagggcgcgtacggcatggtcagctcggcctatgaccacgtgcgcaagactcgcgtggccatcaagaagatcagccccttcgaacatcagacctactgccagcgcacgctccgggagatccagatcctgctgcgcttccgccatgagaatgtcatcggcatccgagacattctgcgggcgtccaccctggaagccatgagagatgtctacattgtgcaggacctgatggagactgacctgtacaagttgctgaaaagccagcagctgagcaatgaccatatctgctacttcctctaccagatcctgcggggcctcaagtacatccactccgccaacgtgctccaccgagatctaaagccctccaacctgctcatcaacaccacctgcgaccttaagatttgtgatttcggcctggcccggattgccgatcctgagcatgaccacaccggcttcctgacggagtatgtggctacgcgctggtaccgggccccagagatcatgctgaactccaagggctataccaagtccatcgacatctggtctgtgggctgcattctggctgagatgctctctaaccggcccatcttccctggcaagcactacctggatcagctcaaccacattctgggcatcctgggctccccatcccaggaggacctgaattgtatcatcaacatgaaggcccgaaactacctacagtctctgccctccaagaccaaggtggcttgggccaagcttttccccaagtcagactccaaagcccttgacctgctggaccggatgttaacctttaaccccaataaacggatcacagtggaggaagcgctggctcacccctacctggagcagtactatgacccgacggatgaggtgggccagtccccagcagcagtggggctgggggcaggggagcaggggggcacgtag

SEQ ID NO: 41 - DNA, 1083 bp, Homo sapiens
atggcggcggcggcggcggcgggcgcgggcccggagatggtccgcgggcaggtgttcgacgtggggccgcgctacaccaacctctcgtacatcggcgagggcgcctacggcatggtgtgctctgcttatgataatgtcaacaaagttcgagtagctatcaagaaaatcagcccctttgagcaccagacctactgccagagaaccctgagggagataaaaatcttactgcgcttcagacatgagaacatcattggaatcaatgacattattcgagcaccaaccatcgagcaaatgaaagatgtatatatagtacaggacctcatggaaacagatctttacaagctcttgaagacacaacacctcagcaatgaccatatctgctattttctctaccagatcctcagagggttaaaatatatccattcagctaacgttctgcaccgtgacctcaagccttccaacctgctgctcaacaccacctgtgatctcaagatctgtgactttggcctggcccgtgttgcagatccagaccatgatcacacagggttcctgacagaatatgtggccacacgttggtacagggctccagaaattatgttgaattccaagggctacaccaagtccattgatatttggtctgtaggctgcattctggcagaaatgctttctaacaggcccatctttccagggaagcattatcttgaccagctgaaccacattttgggtattcttggatccccatcacaagaagacctgaattgtataataaatttaaaagctaggaactatttgctttctcttccacacaaaaataaggtgccatggaacaggctgttcccaaatgctgactccaaagctctggacttattggacaaaatgttgacattcaacccacacaagaggattgaagtagaacaggctctggcccacccatatctggagcagtattacgacccgagtgacgagcccatcgccgaagcaccattcaagttcgacatggaattggatgacttgcctaaggaaaagctcaaagaactaatttttgaagagactgctagattccagccaggatacagatcttaa

SEQ ID NO: 42 - DNA, 954 bp, Homo sapiens
atgttccaggcggccgagcgcccccaggagtgggccatggagggcccccgcgacgggctgaagaaggagcggctactggacgaccgccacgacagcggcctggactccatgaaagacgaggagtacgagcagatggtcaaggagctgcaggagatccgcctcgagccgcaggaggtgccgcgcggctcggagccctggaagcagcagctcaccgaggacggggactcgttcctgcacttggccatcatccatgaagaaaaggcactgaccatggaagtgatccgccaggtgaagggagacctggccttcctcaacttccagaacaacctgcagcagactccactccacttggctgtgatcaccaaccagccagaaattgctgaggcacttctgggagctggctgtgatcctgagctccgagactttcgaggaaatacccccctacaccttgcctgtgagcagggctgcctggccagcgtgggagtcctgactcagtcctgcaccaccccgcacctccactccatcctgaaggctaccaactacaatggccacacgtgtctacacttagcctctatccatggctacctgggcatcgtggagcttttggtgtccttgggtgctgatgtcaatgctcaggagccctgtaatggccggactgcccttcacctcgcagtggacctgcaaaatcctgacctggtgtcactcctgttgaagtgtggggctgatgtcaacagagttacctaccagggctattctccctaccagctcacctggggccgcccaagcacccggatacagcagcagctgggccagctgacactagaaaaccttcagatgctgccagagagtgaggatgaggagagctatgacacagagtcagagttcacggagttcacagaggacgagctgccctatgatgactgtgtgtttggaggccagcgtctgacgttatga

SEQ ID NO: 43 - DNA, 1443 bp, Homo sapiens
atgagcgacgtggctattgtgaaggagggttggctgcacaaacgaggggagtacatcaagacctggcggccacgctacttcctcctcaagaatgatggcaccttcattggctacaaggagcggccgcaggatgtggaccaacgtgaggctcccctcaacaacttctctgtggcgcagtgccagctgatgaagacggagcggccccggcccaacaccttcatcatccgctgcctgcagtggaccactgtcatcgaacgcaccttccatgtggagactcctgaggagcgggaggagtggacaaccgccatccagactgtggctgacggcctcaagaagcaggaggaggaggagatggacttccggtcgggctcacccagtgacaactcaggggctgaagagatggaggtgtccctggccaagcccaagcaccgcgtgaccatgaacgagtttgagtacctgaagctgctgggcaagggcactttcggcaaggtgatcctggtgaaggagaaggccacaggccgctactacgccatgaagatcctcaagaaggaagtcatcgtggccaaggacgaggtggcccacacactcaccgagaaccgcgtcctgcagaactccaggcaccccttcctcacagccctgaagtactctttccagacccacgaccgcctctgctttgtcatggagtacgccaacgggggcgagctgttcttccacctgtcccgggagcgtgtgttctccgaggaccgggcccgcttctatggcgctgagattgtgtcagccctggactacctgcactcggagaagaacgtggtgtaccgggacctcaagctggagaacctcatgctggacaaggacgggcacattaagatcacagacttcgggctgtgcaaggaggggatcaaggacggtgccaccatgaagaccttttgcggcacacctgagtacctggcccccgaggtgctggaggacaatgactacggccgtgcagtggactggtgggggctgggcgtggtcatgtacgagatgatgtgcggtcgcctgcccttctacaaccaggaccatgagaagctttttgagctcatcctcatggaggagatccgcttcccgcgcacgcttggtcccgaggccaagtccttgctttcagggctgctcaagaaggaccccaagcagaggcttggcgggggctccgaggacgccaaggagatcatgcagcatcgcttctttgccggtatcgtgtggcagcacgtgtacgagaagaagctcagcccacccttcaagccccaggtcacgtcggagactgacaccaggtattttgatgaggagttcacggcccagatgatcaccatcacaccacctgaccaagatgacagcatggagtgtgtggacagcgagcgcaggccccacttcccccagttctcctactcggccagcggcacggcctga

SEQ ID NO: 44 - DNA, 957 bp, Homo sapiens
atgtccaagccacccgcacccaaccccacacccccccggaacctggactcccggaccttcatcaccattggagacagaaactttgaggtggaggctgatgacttggtgaccatctcagaactgggccgtggagcctatggggtggtagagaaggtgcggcacgcccagagcggcaccatcatggccgtgaagcggatccgggccaccgtgaactcacaggagcagaagcggctgctcatggacctggacatcaacatgcgcacggtcgactgtttctacactgtcaccttctacggggcactattcagagagggagacgtgtggatctgcatggagctcatggacacatccttggacaagttctaccggaaggtgctggataaaaacatgacaattccagaggacatccttggggagattgctgtgtctatcgtgcgggccctggagcatctgcacagcaagctgtcggtgatccacagagatgtgaagccctccaatgtccttatcaacaaggagggccatgtgaagatgtgtgactttggcatcagtggctacttggtggactctgtggccaagacgatggatgccggctgcaagccctacatggcccctgagaggatcaacccagagctgaaccagaagggctacaatgtcaagtccgacgtctggagcctgggcatcaccatgattgagatggccatcctgcggttcccttacgagtcctgggggaccccgttccagcagctgaagcaggtggtggaggagccgtccccccagctcccagccgaccgtttctcccccgagtttgtggacttcactgctcagtgcctgaggaagaaccccgcagagcgtatgagctacctggagctgatggagcaccccttcttcaccttgcacaaaaccaagaagacggacattgctgccttcgtgaaggagatcctgggagaagactcatag

SEQ ID NO: 45 - DNA, 837 bp, Homo sapiens
atggaactgggacgaggtgcgtacggggtggtggagaagatgcggcacgtgcccagcgggcagatcatggcagtgaagcggatccgagccacagtaaatagccaggaacagaaacggctactgatggatttggatatttccatgaggacggtggactgtccattcactgtcaccttttatggcgcactgtttcgggagggtgatgtgtggatctgcatggagctcatggatacatcactagataaattctacaaacaagttattgataaaggccagacaattccagaggacatcttagggaaaatagcagtttctattgtaaaagcattagaacatttacatagtaagctgtctgtcattcacagagacgtcaagccttctaatgtactcatcaatgctctcggtcaagtgaagatgtgcgattttggaatcagtggctacttggtggactctgttgctaaaacaattgatgcaggttgcaaaccatacatggcccctgaaagaataaacccagagctcaaccagaagggatacagtgtgaagtctgacatttggagtctgggcatcacgatgattgagttggccatccttcgatttccctatgattcatggggaactccatttcagcagctcaaacaggtggtagaggagccatcgccacaactcccagcagacaagttctctgcagagtttgttgactttacctcacagtgcttaaagaagaattccaaagaacggcctacatacccagagctaatgcaacatccatttttcaccctacatgaatccaaaggaacagatgtggcatcttttgtaaaactgattcttggagactaa

SEQ ID NO: 46 - DNA, 1083 bp, Homo sapiens
atgtctcaggagaggcccacgttctaccggcaggagctgaacaagacaatctgggaggtgcccgagcgttaccagaacctgtctccagtgggctctggcgcctatggctctgtgtgtgctgcttttgacacaaaaacggggttacgtgtggcagtgaagaagctctccagaccatttcagtccatcattcatgcgaaaagaacctacagagaactgcggttacttaaacatatgaaacatgaaaatgtgattggtctgttggacgtttttacacctgcaaggtctctggaggaattcaatgatgtgtatctggtgacccatctcatgggggcagatctgaacaacattgtgaaatgtcagaagcttacagatgaccatgttcagttccttatctaccaaattctccgaggtctaaagtatatacattcagctgacataattcacagggacctaaaacctagtaatctagctgtgaatgaagactgtgagctgaagattctggattttggactggctcggcacacagatgatgaaatgacaggctacgtggccactaggtggtacagggctcctgagatcatgctgaactggatgcattacaaccagacagttgatatttggtcagtgggatgcataatggccgagctgttgactggaagaacattgtttcctggtacagaccatattaaccagcttcagcagattatgcgtctgacaggaacaccccccgcttatctcattaacaggatgccaagccatgaggcaagaaactatattcagtctttgactcagatgccgaagatgaactttgcgaatgtatttattggtgccaatcccctggctgtcgacttgctggagaagatgcttgtattggactcagataagagaattacagcggcccaagcccttgcacatgcctactttgctcagtaccacgatcctgatgatgaaccagtggccgatccttatgatcagtcctttgaaagcagggacctccttatagatgagtggaaaagcctgacctatgatgaagtcatcagctttgtgccaccaccccttgaccaagaagagatggagtcctga

SEQ ID NO: 47 - DNA, 1656 bp, Homo sapiens
atggctggtgatctttcagcaggtttcttcatggaggaacttaatacataccgtcagaagcagggagtagtacttaaatatcaagaactgcctaattcaggacctccacatgataggaggtttacatttcaagttataatagatggaagagaatttccagaaggtgaaggtagatcaaagaaggaagcaaaaaatgccgcagccaaattagctgttgagatacttaataaggaaaagaaggcagttagtcctttattattgacaacaacgaattcttcagaaggattatccatggggaattacataggccttatcaatagaattgcccagaagaaaagactaactgtaaattatgaacagtgtgcatcgggggtgcatgggccagaaggatttcattataaatgcaaaatgggacagaaagaatatagtattggtacaggttctactaaacaggaagcaaaacaattggccgctaaacttgcatatcttcagatattatcagaagaaacctcagtgaaatctgactacctgtcctctggttcttttgctactacgtgtgagtcccaaagcaactctttagtgaccagcacactcgcttctgaatcatcatctgaaggtgacttctcagcagatacatcagagataaattctaacagtgacagtttaaacagttcttcgttgcttatgaatggtctcagaaataatcaaaggaaggcaaaaagatctttggcacccagatttgaccttcctgacatgaaagaaacaaagtatactgtggacaagaggtttggcatggattttaaagaaatagaattaattggctcaggtggatttggccaagttttcaaagcaaaacacagaattgacggaaagacttacgttattaaacgtgttaaatataataacgagaaggcggagcgtgaagtaaaagcattggcaaaacttgatcatgtaaatattgttcactacaatggctgttgggatggatttgattatgatcctgagaccagtgatgattctcttgagagcagtgattatgatcctgagaacagcaaaaatagttcaaggtcaaagactaagtgccttttcatccaaatggaattctgtgataaagggaccttggaacaatggattgaaaaaagaagaggcgagaaactagacaaagttttggctttggaactctttgaacaaataacaaaaggggtggattatatacattcaaaaaaattaattcatagagatcttaagccaagtaatatattcttagtagatacaaaacaagtaaagattggagactttggacttgtaacatctctgaaaaatgatggaaagcgaacaaggagtaagggaactttgcgatacatgagcccagaacagatttcttcgcaagactatggaaaggaagtggacctctacgctttggggctaattcttgctgaacttcttcatgtatgtgacactgcttttgaaacatcaaagtttttcacagacctacgggatggcatcatctcagatatatttgataaaaaagaaaaaactcttctacagaaattactctcaaagaaacctgaggatcgacctaacacatctgaaatactaaggaccttgactgtgtggaagaaaagcccagagaaaaatgaacgacacacatgttag

SEQ ID NO: 48 - DNA, 2892 bp, Homo sapiens
atggcggctcagcggatccgagcggccaactccaatggcctccctcgctgcaagtcagaggggaccctgattgacctgagcgaagggttttcagagacgagctttaatgacatcaaagtgccttctcccagtgccttgctcgtagacaaccccacacctttcggaaatgcaaaggaagtgattgcgatcaaggactattgccccaccaacttcaccacactgaagttctccaagggcgaccatctctacgtcttggacacatctggcggtgagtggtggtacgcacacaacaccaccgaaatgggctacatcccctcctcctatgtgcagcccttgaactaccggaactcaacactgagtgacagcggtatgattgataatcttccagacagcccagacgaggtagccaaggagctggagctgctcgggggatggacagatgacaaaaaagtaccaggcagaatgtacagtaataaccctttctggaatggggtccagaccaatccatttctgaatgggaacgtgcccgtcatgcccagcctggatgagctgaatcccaaaagtactgtggatttgctcctttttgacgcaggtacatcctccttcaccgaatccagctcagccaccacgaatagcactggcaacatcttcgatgagcttccagtcacaaacggactccacgcagagccgccggtcaggcgggacaaccccttcttcagaagcaagcgctcctacagtctctcggaactctccgtcctccaagccaagtccgatgctcccacatcgtcgagtttcttcaccggcttgaaatcacctgcccccgagcaatttcagagccgggaggattttcgaactgcctggctaaaccacaggaagctggcccggtcttgccacgacctggacttgcttggccaaagccctggttggggccagacccaagccgtggagacaaacatcgtgtgcaagctggatagctccgggggtgctgtccagcttcctgacaccagcatcagcatccacgtgcccgagggccacgtcgcccctggggagacccagcagatctccatgaaagccctgctggaccccccgctggagctcaacagtgacaggtcctgcagcatcagccctgtgctggaggtcaagctgagcaacctggaggtgaaaacctctatcatcttggagatgaaagtgtcagccgagataaaaaatgacctttttagcaaaagcacagtgggcctccagtgcctgaggagcgactcgaaggaagggccatatgtctccgtcccgctcaactgcagctgtggggacacggtccaggcacagctgcacaacctggagccctgtatgtacgtggctgtcgtggcccatggcccaagcatcctctacccttccaccgtgtgggacttcatcaataaaaaagtcacagtgggtctctacggccctaaacacatccacccatccttcaagacggtagtgaccatttttgggcatgactgtgccccaaagacgctcctggtcagcgaggtcacacgccaggcacccaaccctgccccggtggccctgcagctgtgggggaagcaccagttcgttttgtccaggccccaggatctcaaggtctgtatgttttccaatatgacgaattacgaggtcaaagccagcgagcaggccaaagtggtgcgaggattccagctgaagctgggcaaggtgagccgcctgatcttccccatcacctcccagaaccccaacgagctctctgacttcacgctgcgggttcaggtgaaggacgaccaggaggccatcctcacccagttttgtgtccagactcctcagccaccccctaaaagtgccatcaagccttccgggcaaaggaggtttctcaagaagaacgaagtcgggaaaatcatcctgtccccgtttgccaccactacaaagtacccgactttccaggaccgcccggtgtccagcctcaagtttggtaagttgctcaagactgtggtgcggcagaacaagaaccactacctgctggagtacaagaagggcgacgggatcgccctgctcagcgaggagcgggtcaggctccggggccagctgtggaccaaggagtggtacatcggctactaccagggcagggtgggcctcgtgcacaccaagaacgtgctggtggtcggcagggcccggcccagcctgtgctcgggccccgagctgagcacctcggtgctgctggagcagatcctgcggccctgcaaattcctcacgtacatctatgcctccgtgaggaccctgctcatggagaacatcagcagctggcgctccttcgctgacgccctgggctacgtgaacctgccgctcacctttttctgccgggcagagctggatagtgagcccgagcgggtggcgtccgtcctagaaaagctgaaggaggactgtaacaacactgagaacaaagaacggaagtccttccagaaggagcttgtgatggccctactgaagatggactgccagggcctggtggtcagactcatccaggactttgtgctcctgaccacggctgtagaggtggcccagcgctggcgggagctggctgagaagctggccaaggtctccaagcagcagatggacgcctacgagtctccccaccgggacaggaacggggttgtggacagcgaggccatgtggaagcctgcgtatgacttcttactcacctggagccatcagatcggggacagctaccgggatgtcatccaggagctgcacctgggcctggacaagatgaaaaaccccatcaccaagcgctggaagcacctcactgggactctgatcttggtgaactccctggacgttctgagagcagccgccttcagccctgcggaccaggacgacttcgtgatttga

SEQ ID NO: 49 - DNA, 1113 bp, Homo sapiens
atgctgtccaactcccagggccagagcccgccggtgccgttccccgccccggccccgccgccgcagccccccacccctgccctgccgcaccccccggcgcagccgccgccgccgcccccgcagcagttcccgcagttccacgtcaagtccggcctgcagatcaagaagaacgccatcatcgatgactacaaggtcaccagccaggtcctggggctgggcatcaacggcaaagttttgcagatcttcaacaagaggacccaggagaaattcgccctcaaaatgcttcaggactgccccaaggcccgcagggaggtggagctgcactggcgggcctcccagtgcccgcacatcgtacggatcgtggatgtgtacgagaatctgtacgcagggaggaagtgcctgctgattgtcatggaatgtttggacggtggagaactctttagccgaatccaggatcgaggagaccaggcattcacagaaagagaagcatccgaaatcatgaagagcatcggtgaggccatccagtatctgcattcaatcaacattgcccatcgggatgtcaagcctgagaatctcttatacacctccaaaaggcccaacgccatcctgaaactcactgactttggctttgccaaggaaaccaccagccacaactctttgaccactccttgttatacaccgtactatgtggctccagaagtgctgggtccagagaagtatgacaagtcctgtgacatgtggtccctgggtgtcatcatgtacatcctgctgtgtgggtatccccccttctactccaaccacggccttgccatctctccgggcatgaagactcgcatccgaatgggccagtatgaatttcccaacccagaatggtcagaagtatcagaggaagtgaagatgctcattcggaatctgctgaaaacagagcccacccagagaatgaccatcaccgagtttatgaaccacccttggatcatgcaatcaacaaaggtccctcaaaccccactgcacaccagccgggtcctgaaggaggacaaggagcggtgggaggatgtcaaggggtgtcttcatgacaagaacagcgaccaggccacttggctgaccaggttgtga

SEQ ID NO: 50 - DNA, 5928 bp, Homo sapiens
ggcggtcccctgttctccccgctcaggtgcggcgctgtggcaggaagccaccccctcggtcggccggtgcgcggggctgttgcgccatccgctccggctttcgtaaccgcaccctgggacggcccagagacgctccagcgcgagttcctcaaatgttttcctgcgttgccaggaccgtccgccgctctgagtcatgtgcgagtgggaagtcgcactgacactgagccgggccagagggagaggagccgagcgcggcgcggggccgagggactcgcagtgtgtgtagagagccgggctcctgcggatgggggctgcccccggggcctgagcccgcctgcccgcccaccgccccgccccgcccctgccacccctgccgcccggttcccattagcctgtccgcctctgcgggaccatggagtggtagccgaggaggaagcatgctggccgtcggctgcgcgctgctggctgccctgctggccgcgccgggagcggcgctggccccaaggcgctgccctgcgcaggaggtggcgagaggcgtgctgaccagtctgccaggagacagcgtgactctgacctgcccgggggtagagccggaagacaatgccactgttcactgggtgctcaggaagccggctgcaggctcccaccccagcagatgggctggcatgggaaggaggctgctgctgaggtcggtgcagctccacgactctggaaactattcatgctaccgggccggccgcccagctgggactgtgcacttgctggtggatgttccccccgaggagccccagctctcctgcttccggaagagccccctcagcaatgttgtttgtgagtggggtcctcggagcaccccatccctgacgacaaaggctgtgctcttggtgaggaagtttcagaacagtccggccgaagacttccaggagccgtgccagtattcccaggagtcccagaagttctcctgccagttagcagtcccggagggagacagctctttctacatagtgtccatgtgcgtcgccagtagtgtcgggagcaagttcagcaaaactcaaacctttcagggttgtggaatcttgcagcctgatccgcctgccaacatcacagtcactgccgtggccagaaacccccgctggctcagtgtcacctggcaagacccccactcctggaactcatctttctacagactacggtttgagctcagatatcgggctgaacggtcaaagacattcacaacatggatggtcaaggacctccagcatcactgtgtcatccacgacgcctggagcggcctgaggcacgtggtgcagcttcgtgcccaggaggagttcgggcaaggcgagtggagcgagtggagcccggaggccatgggcacgccttggacagaatccaggagtcctccagctgagaacgaggtgtccacccccatgcaggcacttactactaataaagacgatgataatattctcttcagagattctgcaaatgcgacaagcctcccagtgcaagattcttcttcagtaccactgcccacattcctggttgctggagggagcctggccttcggaacgctcctctgcattgccattgttctgaggttcaagaagacgtggaagctgcgggctctgaaggaaggcaagacaagcatgcatccgccgtactctttggggcagctggtcccggagaggcctcgacccaccccagtgcttgttcctctcatctccccaccggtgtcccccagcagcctggggtctgacaatacctcgagccacaaccgaccagatgccagggacccacggagcccttatgacatcagcaatacagactacttcttccccagatagctggctgggtggcaccagcagcctggaccctgtggatgataaaacacaaacgggctcagcaaaagatgcttctcactgccatgccagcttatctcaggggtgtgcggcctttggcttcacggaagagccttgcggaaggttctacgccaggggaaaatcagcctgctccagctgttcagctggttgaggtttcaaacctccctttccaaatgcccagcttaaaggggctagagtgaacttgggccactgtgaagagaaccatatcaagactctttggacactcacacggacactcaaaagctgggcaggttggtgggggcctcggtgtggagaagcggctggcagcccacccctcaacacctctgcacaagctgcaccctcaggcaggtgggatggatttccagccaaagcctcctccagccgccatgctcctggcccactgcatcgtttcatcttccaactcaaactcttaaaacccaagtgccttagcaaattctgtttttctaggcctggggacggcttttacttaaaccgccaaggctgggggaagaagctctctcctccctttcttccctacagttgaaaaacagctgagggtgagtgggtgaataatacagtatctcagggcctggtcgttttcaacagaattataattagttcctcattagcattttgctaaatgtgaatgatgatcctaggcatttgctgaatacagaggcaactgcattggctttgggttgcaggacctcaggtgagaagcagaggaaggagaggagaggggcacagggtctctaccatcccctgtagagtgggagctgagtgggggatcacagcctctgaaaaccaatgttctctcttctccacctcccacaaaggagagctagcagcagggagggcttctgccatttctgagatcaaaacggttttactgcagctttgtttgttgtcagctgaacctgggtaactagggaagataatattaaggaagacaatgtgaaaagaaaaatgagcctggcaagaatgtgtttaaacttggtttttaaaaaactgctgactgttttctcttgagagggtggaatatccaatattcgctgtgtcagcatagaagtaacttacttaggtgtgggggaagcaccataactttgtttagcccaaaaccaagtcaagtgaaaaaggaggaagagaaaaaatattttcctgccaggcatggtggcccacgcacttcgggaggtcgaggcaggaggatcacttgagtccagaagtttgagatcagcctgggcaatgtgataaaaccccatctctacaaaaagcataaaaattagccaagtgtggtagagtgtgcctgaagtcccagatacttggggggctgaggtgggaggatctcttgagcctgggaggtcaaggctgcagtgagccgagattgcaccactgcactccagcctgggtgacagagcaagtgagaccctgtctcaaaaaaagaaaaagaaaaagaaaaaatattttccctattagagaagagattgtggtttcattctgtattttgtttttgtcttaaaaagtggaaaaatagcctgcctcttctctactctagggaaaaaccagcgtgtgactactcccccaggtggttatggagagggtgtccggtccctgtcccagtgccgagaaggaagcctcccacgactgcccggcagggtcctagaaattccccaccctgaaagccctgagctttctgctatcaaagaggttttaaaaaaatcccatttaaaaaaaatcccttacctcggtgccttcctctttttatttagttccttgagttgattcagctctgcaagaattgaagcaggactaaatgtctagttgtaacaccatgattaaccacttcagctgacttttctgtccgagctttgaaaattcagtggtgttagtggttacccagttagctctcaagttatcagggtattccagagtggggatatgatttaaatcagccgtgtaaccatggacccaatatttaccagaccacaaaacttttctaatactctaccctcttagaaaaaccaccaccatcaccagacaggtgcgaaaggatgaaagtgaccatgttttgtttacggttttccaggtttaagctgttactgtcttcagtaagccgtgattttcattgctgggcttgtctgtagattttagaccctattgctgcttgaggcaactcatcttaggttggcaaaaaggcaggatggccgggcgcggtggctcacgcctgtaatcctagcactttgggaggccaaggtgggaggattgcttgagctcaggagtttgagaccaacctgggtaacatagtgagacaccatctctattatgaacaataacagttaagaaaaaaaaaggcaggcaggcggttatggtggttccctcccatcccaccacataaagtttctgagacttgagaacagcaaaatgctgttaaagggaaatattaagaatgagaatctgcagtaagggtgattctgtgcccacagttcttcaattctttataccgttttacccacatgtggtgttaccaaagccgggcagaaccatgctagcggaagatgtgaaatccagatagctcattattgccaagagctaggcagctttgatctccaaattgttattgctttcatttttattgtaatggaattgctttgttttgtttttttgtttttgtattgaagagggttgttttccctttatttttcataagctaatgtaaatgaagaaaaaatgtcttctctgggctgtaggcctggctcagcgtacacaggtatacatcctaagctctctatgttctctaatctgtggtgactgaacatgtgtctcaatgcacggggcatttctacctgtgtttctgcagcacccccactgccttgagtccccagcagtgctgttatttgcctaacacctgtagccatctgccacgcagccagacgtgaaacgctgagacagagaccatttaggttaaatacgacagcttatcctgctgggtggggaaagtaaaaaatatgctggttcaaggcctaaagtaaaatgatcaataatgtttgtagcattaatgaaatattttcaagaaatgtgtccaggggtagcactggctatgttgacgaggcctttggtaactcagagagctcttggccctgatggggacttgcccttacgctttctttatcaggctctgagttcacacggagcctctggcacttccctgctgtcttgggagaaaggaaactggttgccgcggcaggttgtggaatctgttgctggaaccaggctggaagcccacctggtagtgaacagggcccagtggggcaggctgggcatgttgtggtctatgggtttgtttcctggagaatgttcaggaatgtcttcccagctgctttggtgctgagctctattatctcacagcacgtccagaaggctaacccaggtggggaggatgctgacaccagctccaggtggagttggtggtcttaatttggagatgcaggggcaacctgtgaccctttgaggcaagagccctgcacccagctgtcccgtgcagccgtgggcaggggctgcacacggaggggcaggcgggccagttcagggtccgtgccaggccctcctcagtgccctgtgaaggcctcctgtcctccgtgcggctgggcaccagcaccagggagtttctatggcaaccttagtgattattaaggaacactgtcagttttatgaacatatgctcaaatgaaattctactttaggaggaaaggattggaacagcatgtcacaaggctgttaattaacagagagaccttattggatggagatcacatctgttaaatagaatacctcaactctacgttgttttcttggagataaataatagtttcaagtttttgtttgtttgttttacctaattacctgaaagcaaataccaaaggctgatgtctgtatatggggcaaagggtcagtatatttttcagtgtttttttttctaccagctattttgcatttaaagtgaacattgtgtttggaataaatactcttaaaaaataaaaaaaaaaaaaaa

SEQ ID NO: 51 - DNA, 5834 bp, Homo sapiens
ggcggtcccctgttctccccgctcaggtgcggcgctgtggcaggaagccaccccctcggtcggccggtgcgcggggctgttgcgccatccgctccggctttcgtaaccgcaccctgggacggcccagagacgctccagcgcgagttcctcaaatgttttcctgcgttgccaggaccgtccgccgctctgagtcatgtgcgagtgggaagtcgcactgacactgagccgggccagagggagaggagccgagcgcggcgcggggccgagggactcgcagtgtgtgtagagagccgggctcctgcggatgggggctgcccccggggcctgagcccgcctgcccgcccaccgccccgccccgcccctgccacccctgccgcccggttcccattagcctgtccgcctctgcgggaccatggagtggtagccgaggaggaagcatgctggccgtcggctgcgcgctgctggctgccctgctggccgcgccgggagcggcgctggccccaaggcgctgccctgcgcaggaggtggcgagaggcgtgctgaccagtctgccaggagacagcgtgactctgacctgcccgggggtagagccggaagacaatgccactgttcactgggtgctcaggaagccggctgcaggctcccaccccagcagatgggctggcatgggaaggaggctgctgctgaggtcggtgcagctccacgactctggaaactattcatgctaccgggccggccgcccagctgggactgtgcacttgctggtggatgttccccccgaggagccccagctctcctgcttccggaagagccccctcagcaatgttgtttgtgagtggggtcctcggagcaccccatccctgacgacaaaggctgtgctcttggtgaggaagtttcagaacagtccggccgaagacttccaggagccgtgccagtattcccaggagtcccagaagttctcctgccagttagcagtcccggagggagacagctctttctacatagtgtccatgtgcgtcgccagtagtgtcgggagcaagttcagcaaaactcaaacctttcagggttgtggaatcttgcagcctgatccgcctgccaacatcacagtcactgccgtggccagaaacccccgctggctcagtgtcacctggcaagacccccactcctggaactcatctttctacagactacggtttgagctcagatatcgggctgaacggtcaaagacattcacaacatggatggtcaaggacctccagcatcactgtgtcatccacgacgcctggagcggcctgaggcacgtggtgcagcttcgtgcccaggaggagttcgggcaaggcgagtggagcgagtggagcccggaggccatgggcacgccttggacagaatccaggagtcctccagctgagaacgaggtgtccacccccatgcaggcacttactactaataaagacgatgataatattctcttcagagattctgcaaatgcgacaagcctcccaggttcaagaagacgtggaagctgcgggctctgaaggaaggcaagacaagcatgcatccgccgtactctttggggcagctggtcccggagaggcctcgacccaccccagtgcttgttcctctcatctccccaccggtgtcccccagcagcctggggtctgacaatacctcgagccacaaccgaccagatgccagggacccacggagcccttatgacatcagcaatacagactacttcttccccagatagctggctgggtggcaccagcagcctggaccctgtggatgataaaacacaaacgggctcagcaaaagatgcttctcactgccatgccagcttatctcaggggtgtgcggcctttggcttcacggaagagccttgcggaaggttctacgccaggggaaaatcagcctgctccagctgttcagctggttgaggtttcaaacctccctttccaaatgcccagcttaaaggggctagagtgaacttgggccactgtgaagagaaccatatcaagactctttggacactcacacggacactcaaaagctgggcaggttggtgggggcctcggtgtggagaagcggctggcagcccacccctcaacacctctgcacaagctgcaccctcaggcaggtgggatggatttccagccaaagcctcctccagccgccatgctcctggcccactgcatcgtttcatcttccaactcaaactcttaaaacccaagtgccttagcaaattctgtttttctaggcctggggacggcttttacttaaaccgccaaggctgggggaagaagctctctcctccctttcttccctacagttgaaaaacagctgagggtgagtgggtgaataatacagtatctcagggcctggtcgttttcaacagaattataattagttcctcattagcattttgctaaatgtgaatgatgatcctaggcatttgctgaatacagaggcaactgcattggctttgggttgcaggacctcaggtgagaagcagaggaaggagaggagaggggcacagggtctctaccatcccctgtagagtgggagctgagtgggggatcacagcctctgaaaaccaatgttctctcttctccacctcccacaaaggagagctagcagcagggagggcttctgccatttctgagatcaaaacggttttactgcagctttgtttgttgtcagctgaacctgggtaactagggaagataatattaaggaagacaatgtgaaaagaaaaatgagcctggcaagaatgtgtttaaacttggtttttaaaaaactgctgactgttttctcttgagagggtggaatatccaatattcgctgtgtcagcatagaagtaacttacttaggtgtgggggaagcaccataactttgtttagcccaaaaccaagtcaagtgaaaaaggaggaagagaaaaaatattttcctgccaggcatggtggcccacgcacttcgggaggtcgaggcaggaggatcacttgagtccagaagtttgagatcagcctgggcaatgtgataaaaccccatctctacaaaaagcataaaaattagccaagtgtggtagagtgtgcctgaagtcccagatacttggggggctgaggtgggaggatctcttgagcctgggaggtcaaggctgcagtgagccgagattgcaccactgcactccagcctgggtgacagagcaagtgagaccctgtctcaaaaaaagaaaaagaaaaagaaaaaatattttccctattagagaagagattgtggtttcattctgtattttgtttttgtcttaaaaagtggaaaaatagcctgcctcttctctactctagggaaaaaccagcgtgtgactactcccccaggtggttatggagagggtgtccggtccctgtcccagtgccgagaaggaagcctcccacgactgcccggcagggtcctagaaattccccaccctgaaagccctgagctttctgctatcaaagaggttttaaaaaaatcccatttaaaaaaaatcccttacctcggtgccttcctctttttatttagttccttgagttgattcagctctgcaagaattgaagcaggactaaatgtctagttgtaacaccatgattaaccacttcagctgacttttctgtccgagctttgaaaattcagtggtgttagtggttacccagttagctctcaagttatcagggtattccagagtggggatatgatttaaatcagccgtgtaaccatggacccaatatttaccagaccacaaaacttttctaatactctaccctcttagaaaaaccaccaccatcaccagacaggtgcgaaaggatgaaagtgaccatgttttgtttacggttttccaggtttaagctgttactgtcttcagtaagccgtgattttcattgctgggcttgtctgtagattttagaccctattgctgcttgaggcaactcatcttaggttggcaaaaaggcaggatggccgggcgcggtggctcacgcctgtaatcctagcactttgggaggccaaggtgggaggattgcttgagctcaggagtttgagaccaacctgggtaacatagtgagacaccatctctattatgaacaataacagttaagaaaaaaaaaggcaggcaggcggttatggtggttccctcccatcccaccacataaagtttctgagacttgagaacagcaaaatgctgttaaagggaaatattaagaatgagaatctgcagtaagggtgattctgtgcccacagttcttcaattctttataccgttttacccacatgtggtgttaccaaagccgggcagaaccatgctagcggaagatgtgaaatccagatagctcattattgccaagagctaggcagctttgatctccaaattgttattgctttcatttttattgtaatggaattgctttgttttgtttttttgtttttgtattgaagagggttgttttccctttatttttcataagctaatgtaaatgaagaaaaaatgtcttctctgggctgtaggcctggctcagcgtacacaggtatacatcctaagctctctatgttctctaatctgtggtgactgaacatgtgtctcaatgcacggggcatttctacctgtgtttctgcagcacccccactgccttgagtccccagcagtgctgttatttgcctaacacctgtagccatctgccacgcagccagacgtgaaacgctgagacagagaccatttaggttaaatacgacagcttatcctgctgggtggggaaagtaaaaaatatgctggttcaaggcctaaagtaaaatgatcaataatgtttgtagcattaatgaaatattttcaagaaatgtgtccaggggtagcactggctatgttgacgaggcctttggtaactcagagagctcttggccctgatggggacttgcccttacgctttctttatcaggctctgagttcacacggagcctctggcacttccctgctgtcttgggagaaaggaaactggttgccgcggcaggttgtggaatctgttgctggaaccaggctggaagcccacctggtagtgaacagggcccagtggggcaggctgggcatgttgtggtctatgggtttgtttcctggagaatgttcaggaatgtcttcccagctgctttggtgctgagctctattatctcacagcacgtccagaaggctaacccaggtggggaggatgctgacaccagctccaggtggagttggtggtcttaatttggagatgcaggggcaacctgtgaccctttgaggcaagagccctgcacccagctgtcccgtgcagccgtgggcaggggctgcacacggaggggcaggcgggccagttcagggtccgtgccaggccctcctcagtgccctgtgaaggcctcctgtcctccgtgcggctgggcaccagcaccagggagtttctatggcaaccttagtgattattaaggaacactgtcagttttatgaacatatgctcaaatgaaattctactttaggaggaaaggattggaacagcatgtcacaaggctgttaattaacagagagaccttattggatggagatcacatctgttaaatagaatacctcaactctacgttgttttcttggagataaataatagtttcaagtttttgtttgtttgttttacctaattacctgaaagcaaataccaaaggctgatgtctgtatatggggcaaagggtcagtatatttttcagtgtttttttttctaccagctattttgcatttaaagtgaacattgtgtttggaataaatactcttaaaaaataaaaaaaaaaaaaaa

SEQ ID NO: 52 - DNA, 2058 bp, Homo sapiens
ggcggtcccctgttctccccgctcaggtgcggcgctgtggcaggaagccaccccctcggtcggccggtgcgcggggctgttgcgccatccgctccggctttcgtaaccgcaccctgggacggcccagagacgctccagcgcgagttcctcaaatgttttcctgcgttgccaggaccgtccgccgctctgagtcatgtgcgagtgggaagtcgcactgacactgagccgggccagagggagaggagccgagcgcggcgcggggccgagggactcgcagtgtgtgtagagagccgggctcctgcggatgggggctgcccccggggcctgagcccgcctgcccgcccaccgccccgccccgcccctgccacccctgccgcccggttcccattagcctgtccgcctctgcgggaccatggagtggtagccgaggaggaagcatgctggccgtcggctgcgcgctgctggctgccctgctggccgcgccgggagcggcgctggccccaaggcgctgccctgcgcaggaggtggcgagaggcgtgctgaccagtctgccaggagacagcgtgactctgacctgcccgggggtagagccggaagacaatgccactgttcactgggtgctcaggaagccggctgcaggctcccaccccagcagatgggctggcatgggaaggaggctgctgctgaggtcggtgcagctccacgactctggaaactattcatgctaccgggccggccgcccagctgggactgtgcacttgctggtggatgttccccccgaggagccccagctctcctgcttccggaagagccccctcagcaatgttgtttgtgagtggggtcctcggagcaccccatccctgacgacaaaggctgtgctcttggtgaggaagtttcagaacagtccggccgaagacttccaggagccgtgccagtattcccaggagtcccagaagttctcctgccagttagcagtcccggagggagacagctctttctacatagtgtccatgtgcgtcgccagtagtgtcgggagcaagttcagcaaaactcaaacctttcagggttgtggaatcttgcagcctgatccgcctgccaacatcacagtcactgccgtggccagaaacccccgctggctcagtgtcacctggcaagacccccactcctggaactcatctttctacagactacggtttgagctcagatatcgggctgaacggtcaaagacattcacaacatggatggtcaaggacctccagcatcactgtgtcatccacgacgcctggagcggcctgaggcacgtggtgcagcttcgtgcccaggaggagttcgggcaaggcgagtggagcgagtggagcccggaggccatgggcacgccttggacagacaggctttctcctcgttgcccaggatggagtacagcagtgcaatcacagctcacggcaacttctgcctcctgggttcaagcaatcctcccgcctcagcctcctaagtagctgggaccacaggcgtgtgccacaatgctaattttttaaaaatgttttgtagagacagggtttcaccatgctgcccaggctggtctcgaactcctggcctcaagtgatccaccagcctcagactcccaaagtgctgggattactggtgtgagccactgcacctgactaaactttaaatttttttttttagacggaatctcgctctgttgcccaggctggagtgcagtggcatgatattggctcactgcaagctctgcctcttgggttcacgctattctcctgcctcagcctcctgagtagctgggactacaggtgcacaccaccacgcccggctaatttttttttttttttagtagagacggggtttcactgtgttggccaggctggtcttgaactcctgacctcgtgatccacccgcctcgccctcccaaaatgctgggattacaggtgtgagccaccgcgcctggcctaaacttttaaaattttaatcaaattaatacatgcacatggcaaagaagtaataaacagcttataacactgaaaaaaaaaaaaaaaaaaaaaa

SEQ ID NO: 53 - DNA, 3085 bp, Homo sapiens
gagcagccaaaaggcccgcggagtcgcgctgggccgccccggcgcagctgaaccgggggccgcgcctgccaggccgacgggtctggcccagcctggcgccaaggggttcgtgcgctgtggagacgcggagggtcgaggcggcgcggcctgagtgaaacccaatggaaaaagcatgacatttagaagtagaagacttagcttcaaatccctactccttcacttactaattttgtgatttggaaatatccgcgcaagatgttgacgttgcagacttgggtagtgcaagccttgtttattttcctcaccactgaatctacaggtgaacttctagatccatgtggttatatcagtcctgaatctccagttgtacaacttcattctaatttcactgcagtttgtgtgctaaaggaaaaatgtatggattattttcatgtaaatgctaattacattgtctggaaaacaaaccattttactattcctaaggagcaatatactatcataaacagaacagcatccagtgtcacctttacagatatagcttcattaaatattcagctcacttgcaacattcttacattcggacagcttgaacagaatgtttatggaatcacaataatttcaggcttgcctccagaaaaacctaaaaatttgagttgcattgtgaacgaggggaagaaaatgaggtgtgagtgggatggtggaagggaaacacacttggagacaaacttcactttaaaatctgaatgggcaacacacaagtttgctgattgcaaagcaaaacgtgacacccccacctcatgcactgttgattattctactgtgtattttgtcaacattgaagtctgggtagaagcagagaatgcccttgggaaggttacatcagatcatatcaattttgatcctgtatataaagtgaagcccaatccgccacataatttatcagtgatcaactcagaggaactgtctagtatcttaaaattgacatggaccaacccaagtattaagagtgttataatactaaaatataacattcaatataggaccaaagatgcctcaacttggagccagattcctcctgaagacacagcatccacccgatcttcattcactgtccaagaccttaaaccttttacagaatatgtgtttaggattcgctgtatgaaggaagatggtaagggatactggagtgactggagtgaagaagcaagtgggatcacctatgaagatagaccatctaaagcaccaagtttctggtataaaatagatccatcccatactcaaggctacagaactgtacaactcgtgtggaagacattgcctccttttgaagccaatggaaaaatcttggattatgaagtgactctcacaagatggaaatcacatttacaaaattacacagttaatgccacaaaactgacagtaaatctcacaaatgatcgctatctagcaaccctaacagtaagaaatcttgttggcaaatcagatgcagctgttttaactatccctgcctgtgactttcaagctactcaccctgtaatggatcttaaagcattccccaaagataacatgctttgggtggaatggactactccaagggaatctgtaaagaaatatatacttgagtggtgtgtgttatcagataaagcaccctgtatcacagactggcaacaagaagatggtaccgtgcatcgcacctatttaagagggaacttagcagagagcaaatgctatttgataacagttactccagtatatgctgatggaccaggaagccctgaatccataaaggcataccttaaacaagctccaccttccaaaggacctactgttcggacaaaaaaagtagggaaaaacgaagctgtcttagagtgggaccaacttcctgttgatgttcagaatggatttatcagaaattatactatattttatagaaccatcattggaaatgaaactgctgtgaatgtggattcttcccacacagaatatacattgtcctctttgactagtgacacattgtacatggtacgaatggcagcatacacagatgaaggtgggaaggatggtccagaattcacttttactaccccaaagtttgctcaaggagaaattgaagccatagtcgtgcctgtttgcttagcattcctattgacaactcttctgggagtgctgttctgctttaataagcgagacctaattaaaaaacacatctggcctaatgttccagatccttcaaagagtcatattgcccagtggtcacctcacactcctccaaggcacaattttaattcaaaagatcaaatgtattcagatggcaatttcactgatgtaagtgttgtggaaatagaagcaaatgacaaaaagccttttccagaagatctgaaatcattggacctgttcaaaaaggaaaaaattaatactgaaggacacagcagtggtattggggggtcttcatgcatgtcatcttctaggccaagcatttctagcagtgatgaaaatgaatcttcacaaaacacttcgagcactgtccagtattctaccgtggtacacagtggctacagacaccaagttccgtcagtccaagtcttctcaagatccgagtctacccagcccttgttagattcagaggagcggccagaagatctacaattagtagatcatgtagatggcggtgatggtattttgcccaggcaacagtacttcaaacagaactgcagtcagcatgaatccagtccagatatttcacattttgaaaggtcaaagcaagtttcatcagtcaatgaggaagattttgttagacttaaacagcagatttcagatcatatttcacaatcctgtggatctgggcaaatgaaaatgtttcaggaagtttctgcagcagatgcttttggtccaggtactgagggacaagtagaaagatttgaaacagttggcatggaggctgcgactgatgaaggcatgcctaaaagttacttaccacagactgtacggcaaggcggctacatgcctcagtgaaggactagtagttcctgctacaacttcagcagtacctataaagtaaagctaaaatgattttatctgtgaattc

SEQ ID NO: 54 - DNA, 1197 bp, Homo sapiens
gtctcaatattagagtctcaacccccaataaatataggactggagatgtctgaggctcattctgccctcgagcccaccgggaacgaaagagaagctctatctcccctccaggagcccagctatgaactccttctccacaagcgccttcggtccagttgccttctccctggggctgctcctggtgttgcctgctgccttccctgccccagtacccccaggagaagattccaaagatgtagccgccccacacagacagccactcacctcttcagaacgaattgacaaacaaattcggtacatcctcgacggcatctcagccctgagaaaggagacatgtaacaagagtaacatgtgtgaaagcagcaaagaggcactggcagaaaacaacctgaaccttccaaagatggctgaaaaagatggatgcttccaatctggattcaatgaggagacttgcctggtgaaaatcatcactggtcttttggagtttgaggtatacctagagtacctccagaacagatttgagagtagtgaggaacaagccagagctgtgcagatgagtacaaaagtcctgatccagttcctgcagaaaaaggcaaagaatctagatgcaataaccacccctgacccaaccacaaatgccagcctgctgacgaagctgcaggcacagaaccagtggctgcaggacatgacaactcatctcattctgcgcagctttaaggagttcctgcagtccagcctgagggctcttcggcaaatgtagcatgggcacctcagattgttgttgttaatgggcattccttcttctggtcagaaacctgtccactgggcacagaacttatgttgttctctatggagaactaaaagtatgagcgttaggacactattttaattatttttaatttattaatatttaaatatgtgaagctgagttaatttatgtaagtcatatttatatttttaagaagtaccacttgaaacattttatgtattagttttgaaataataatggaaagtggctatgcagtttgaatatcctttgtttcagagccagatcatttcttggaaagtgtaggcttacctcaaataaatggctaacttatacatatttttaaagaaatatttatattgtatttatataatgtataaatggtttttataccaataaatggcattttaaaaaattcagcaaaaaaaaaa

SEQ ID NO: 55 - DNA, 1006 bp, Homo sapiens
gtctcaatattagagtctcaacccccaataaatataggactggagatgtctgaggctcattctgccctcgagcccaccgggaacgaaagagaagctctatctcccctccaggagcccagctatgaactccttctccacaaacatgtaacaagagtaacatgtgtgaaagcagcaaagaggcactggcagaaaacaacctgaaccttccaaagatggctgaaaaagatggatgcttccaatctggattcaatgaggagacttgcctggtgaaaatcatcactggtcttttggagtttgaggtatacctagagtacctccagaacagatttgagagtagtgaggaacaagccagagctgtgcagatgagtacaaaagtcctgatccagttcctgcagaaaaaggcaaagaatctagatgcaataaccacccctgacccaaccacaaatgccagcctgctgacgaagctgcaggcacagaaccagtggctgcaggacatgacaactcatctcattctgcgcagctttaaggagttcctgcagtccagcctgagggctcttcggcaaatgtagcatgggcacctcagattgttgttgttaatgggcattccttcttctggtcagaaacctgtccactgggcacagaacttatgttgttctctatggagaactaaaagtatgagcgttaggacactattttaattatttttaatttattaatatttaaatatgtgaagctgagttaatttatgtaagtcatatttatatttttaagaagtaccacttgaaacattttatgtattagttttgaaataataatggaaagtggctatgcagtttgaatatcctttgtttcagagccagatcatttcttggaaagtgtaggcttacctcaaataaatggctaacttatacatatttttaaagaaatatttatattgtatttatataatgtataaatggtttttataccaataaatggcattttaaaaaattcagcaaaaaaaaaa

SEQ ID NO: 56 - DNA, 1629 bp, Homo sapiens
tttcctgggcggggccaaggctggggcaggggagtcagcagaggcctcgctcgggcgcccagtggtcctgccgcctggtctcacctcgctatggttcgtctgcctctgcagtgcgtcctctggggctgcttgctgaccgctgtccatccagaaccacccactgcatgcagagaaaaacagtacctaataaacagtcagtgctgttctttgtgccagccaggacagaaactggtgagtgactgcacagagttcactgaaacggaatgccttccttgcggtgaaagcgaattcctagacacctggaacagagagacacactgccaccagcacaaatactgcgaccccaacctagggcttcgggtccagcagaagggcacctcagaaacagacaccatctgcacctgtgaagaaggctggcactgtacgagtgaggcctgtgagagctgtgtcctgcaccgctcatgctcgcccggctttggggtcaagcagattgctacaggggtttctgataccatctgcgagccctgcccagtcggcttcttctccaatgtgtcatctgctttcgaaaaatgtcacccttggacaagctgtgagaccaaagacctggttgtgcaacaggcaggcacaaacaagactgatgttgtctgtggtccccaggatcggctgagagccctggtggtgatccccatcatcttcgggatcctgtttgccatcctcttggtgctggtctttatcaaaaaggtggccaagaagccaaccaataaggccccccaccccaagcaggaaccccaggagatcaattttcccgacgatcttcctggctccaacactgctgctccagtgcaggagactttacatggatgccaaccggtcacccaggaggatggcaaagagagtcgcatctcagtgcaggagagacagtgaggctgcacccacccaggagtgtggccacgtgggcaaacaggcagttggccagagagcctggtgctgctgctgctgtggcgtgagggtgaggggctggcactgactgggcatagctccccgcttctgcctgcacccctgcagtttgagacaggagacctggcactggatgcagaaacagttcaccttgaagaacctctcacttcaccctggagcccatccagtctcccaacttgtattaaagacagaggcagaagtttggtggtggtggtgttggggtatggtttagtaatatccaccagaccttccgatccagcagtttggtgcccagagaggcatcatggtggcttccctgcgcccaggaagccatatacacagatgcccattgcagcattgtttgtgatagtgaacaactggaagctgcttaactgtccatcagcaggagactggctaaataaaattagaatatatttatacaacagaatctcaaaaacactgttgagtaaggaaaaaaaggcatgctgctgaatgatgggtatggaactttttaaaaaagtacatgcttttatgtatgtatattgcctatggatatatgtataaatacaatatgcatcatatattgatataacaagggttctggaagggtacacagaaaacccacagctcgaagagtggtgacgtctggggtggggaagaagggtctggggg

SEQ ID NO: 57 - DNA, 1567 bp, Homo sapiens
tttcctgggcggggccaaggctggggcaggggagtcagcagaggcctcgctcgggcgcccagtggtcctgccgcctggtctcacctcgctatggttcgtctgcctctgcagtgcgtcctctggggctgcttgctgaccgctgtccatccagaaccacccactgcatgcagagaaaaacagtacctaataaacagtcagtgctgttctttgtgccagccaggacagaaactggtgagtgactgcacagagttcactgaaacggaatgccttccttgcggtgaaagcgaattcctagacacctggaacagagagacacactgccaccagcacaaatactgcgaccccaacctagggcttcgggtccagcagaagggcacctcagaaacagacaccatctgcacctgtgaagaaggctggcactgtacgagtgaggcctgtgagagctgtgtcctgcaccgctcatgctcgcccggctttggggtcaagcagattgctacaggggtttctgataccatctgcgagccctgcccagtcggcttcttctccaatgtgtcatctgctttcgaaaaatgtcacccttggacaaggtccccaggatcggctgagagccctggtggtgatccccatcatcttcgggatcctgtttgccatcctcttggtgctggtctttatcaaaaaggtggccaagaagccaaccaataaggccccccaccccaagcaggaaccccaggagatcaattttcccgacgatcttcctggctccaacactgctgctccagtgcaggagactttacatggatgccaaccggtcacccaggaggatggcaaagagagtcgcatctcagtgcaggagagacagtgaggctgcacccacccaggagtgtggccacgtgggcaaacaggcagttggccagagagcctggtgctgctgctgctgtggcgtgagggtgaggggctggcactgactgggcatagctccccgcttctgcctgcacccctgcagtttgagacaggagacctggcactggatgcagaaacagttcaccttgaagaacctctcacttcaccctggagcccatccagtctcccaacttgtattaaagacagaggcagaagtttggtggtggtggtgttggggtatggtttagtaatatccaccagaccttccgatccagcagtttggtgcccagagaggcatcatggtggcttccctgcgcccaggaagccatatacacagatgcccattgcagcattgtttgtgatagtgaacaactggaagctgcttaactgtccatcagcaggagactggctaaataaaattagaatatatttatacaacagaatctcaaaaacactgttgagtaaggaaaaaaaggcatgctgctgaatgatgggtatggaactttttaaaaaagtacatgcttttatgtatgtatattgcctatggatatatgtataaatacaatatgcatcatatattgatataacaagggttctggaagggtacacagaaaacccacagctcgaagagtggtgacgtctggggtggggaagaagggtctggggg

SEQ ID NO: 58 - DNA, 1669 bp, Homo sapiens
tttcctgggcggggccaaggctggggcaggggagtcagcagaggcctcgctcgggcgcccagtggtcctgccgcctggtctcacctcgctatggttcgtctgcctctgcagtgcgtcctctggggctgcttgctgaccgctgtccatccagaaccacccactgcatgcagagaaaaacagtacctaataaacagtcagtgctgttctttgtgccagccaggacagaaactggtgagtgactgcacagagttcactgaaacggaatgccttccttgcggtgaaagcgaattcctagacacctggaacagagagacacactgccaccagcacaaatactgcgaccccaacctagggcttcgggtccagcagaagggcacctcagaaacagacaccatctgcacctgtgaagaaggctggcactgtacgagtgaggcctgtgagagctgtgtcctgcaccgctcatgctcgcccggctttggggtcaagcagattgctacaggggtttctgataccatctgcgagccctgcccagtcggcttcttctccaatgtgtcatctgctttcgaaaaatgtcacccttggacaagctgtgagaccaaagacctggttgtgcaacaggcaggcacaaacaagactgatgttgtctgtggtgagtcctggacaatgggccctggagaaagcctaggaaggtccccaggatcggctgagagccctggtggtgatccccatcatcttcgggatcctgtttgccatcctcttggtgctggtctttatcaaaaaggtggccaagaagccaaccaataaggccccccaccccaagcaggaaccccaggagatcaattttcccgacgatcttcctggctccaacactgctgctccagtgcaggagactttacatggatgccaaccggtcacccaggaggatggcaaagagagtcgcatctcagtgcaggagagacagtgaggctgcacccacccaggagtgtggccacgtgggcaaacaggcagttggccagagagcctggtgctgctgctgctgtggcgtgagggtgaggggctggcactgactgggcatagctccccgcttctgcctgcacccctgcagtttgagacaggagacctggcactggatgcagaaacagttcaccttgaagaacctctcacttcaccctggagcccatccagtctcccaacttgtattaaagacagaggcagaagtttggtggtggtggtgttggggtatggtttagtaatatccaccagaccttccgatccagcagtttggtgcccagagaggcatcatggtggcttccctgcgcccaggaagccatatacacagatgcccattgcagcattgtttgtgatagtgaacaactggaagctgcttaactgtccatcagcaggagactggctaaataaaattagaatatatttatacaacagaatctcaaaaacactgttgagtaaggaaaaaaaggcatgctgctgaatgatgggtatggaactttttaaaaaagtacatgcttttatgtatgtatattgcctatggatatatgtataaatacaatatgcatcatatattgatataacaagggttctggaagggtacacagaaaacccacagctcgaagagtggtgacgtctggggtggggaagaagggtctggggg

SEQ ID NO: 59 - DNA, 1641 bp, Homo sapiens
tttcctgggcggggccaaggctggggcaggggagtcagcagaggcctcgctcgggcgcccagtggtcctgccgcctggtctcacctcgctatggttcgtctgcctctgcagtgcgtcctctggggctgcttgctgaccgctgtccatccagaaccacccactgcatgcagagaaaaacagtacctaataaacagtcagtgctgttctttgtgccagccaggacagaaactggtgagtgactgcacagagttcactgaaacggaatgccttccttgcggtgaaagcgaattcctagacacctggaacagagagacacactgccaccagcacaaatactgcgaccccaacctagggcttcgggtccagcagaagggcacctcagaaacagacaccatctgcacctgtgaagaaggctggcactgtacgagtgaggcctgtgagagctgtgtcctgcaccgctcatgctcgcccggctttggggtcaagcagattgctacaggggtttctgataccatctgcgagccctgcccagtcggcttcttctccaatgtgtcatctgctttcgaaaaatgtcacccttggacaagctgtgagaccaaagacctggttgtgcaacaggcaggcacaaacaagactgatgttgtctgtggtccccaggatcggctgagagccctggtggtgatccccatcatcttcgggatcctgtttgccatcctcttggtgctggtctttatcagtgagtcctcagaaaaggtggccaagaagccaaccaataaggccccccaccccaagcaggaaccccaggagatcaattttcccgacgatcttcctggctccaacactgctgctccagtgcaggagactttacatggatgccaaccggtcacccaggaggatggcaaagagagtcgcatctcagtgcaggagagacagtgaggctgcacccacccaggagtgtggccacgtgggcaaacaggcagttggccagagagcctggtgctgctgctgctgtggcgtgagggtgaggggctggcactgactgggcatagctccccgcttctgcctgcacccctgcagtttgagacaggagacctggcactggatgcagaaacagttcaccttgaagaacctctcacttcaccctggagcccatccagtctcccaacttgtattaaagacagaggcagaagtttggtggtggtggtgttggggtatggtttagtaatatccaccagaccttccgatccagcagtttggtgcccagagaggcatcatggtggcttccctgcgcccaggaagccatatacacagatgcccattgcagcattgtttgtgatagtgaacaactggaagctgcttaactgtccatcagcaggagactggctaaataaaattagaatatatttatacaacagaatctcaaaaacactgttgagtaaggaaaaaaaggcatgctgctgaatgatgggtatggaactttttaaaaaagtacatgcttttatgtatgtatattgcctatggatatatgtataaatacaatatgcatcatatattgatataacaagggttctggaagggtacacagaaaacccacagctcgaagagtggtgacgtctggggtggggaagaagggtctggggg

SEQ ID NO: 60 - DNA, 1473 bp, Homo sapiens
tttcctgggcggggccaaggctggggcaggggagtcagcagaggcctcgctcgggcgcccagtggtcctgccgcctggtctcacctcgctatggttcgtctgcctctgcagtgcgtcctctggggctgcttgctgaccgctgtccatccagaaccacccactgcatgcagagaaaaacagtacctaataaacagtcagtgctgttctttgtgccagccaggacagaaactggtgagtgactgcacagagttcactgaaacggaatgccttccttgcggtgaaagcgaattcctagacacctggaacagagagacacactgccaccagcacaaatactgcgaccccaacctagggcttcgggtccagcagaagggcacctcagaaacagacaccatctgcacctgtgaagaaggctggcactgtacgagtgaggcctgtgagagctgtgtcctgcaccgctcatgctcgcccggctttggggtcaagcagattggtccccaggatcggctgagagccctggtggtgatccccatcatcttcgggatcctgtttgccatcctcttggtgctggtctttatcaaaaaggtggccaagaagccaaccaataaggccccccaccccaagcaggaaccccaggagatcaattttcccgacgatcttcctggctccaacactgctgctccagtgcaggagactttacatggatgccaaccggtcacccaggaggatggcaaagagagtcgcatctcagtgcaggagagacagtgaggctgcacccacccaggagtgtggccacgtgggcaaacaggcagttggccagagagcctggtgctgctgctgctgtggcgtgagggtgaggggctggcactgactgggcatagctccccgcttctgcctgcacccctgcagtttgagacaggagacctggcactggatgcagaaacagttcaccttgaagaacctctcacttcaccctggagcccatccagtctcccaacttgtattaaagacagaggcagaagtttggtggtggtggtgttggggtatggtttagtaatatccaccagaccttccgatccagcagtttggtgcccagagaggcatcatggtggcttccctgcgcccaggaagccatatacacagatgcccattgcagcattgtttgtgatagtgaacaactggaagctgcttaactgtccatcagcaggagactggctaaataaaattagaatatatttatacaacagaatctcaaaaacactgttgagtaaggaaaaaaaggcatgctgctgaatgatgggtatggaactttttaaaaaagtacatgcttttatgtatgtatattgcctatggatatatgtataaatacaatatgcatcatatattgatataacaagggttctggaagggtacacagaaaacccacagctcgaagagtggtgacgtctggggtggggaagaagggtctggggg

SEQ ID NO: 61 - DNA, 1834 bp, Homo sapiens
actttgacagtcttctcatgctgcctctgccaccttctctgccagaagataccatttcaactttaacacagcatgatcgaaacatacaaccaaacttctccccgatctgcggccactggactgcccatcagcatgaaaatttttatgtatttacttactgtttttcttatcacccagatgattgggtcagcactttttgctgtgtatcttcatagaaggttggacaagatagaagatgaaaggaatcttcatgaagattttgtattcatgaaaacgatacagagatgcaacacaggagaaagatccttatccttactgaactgtgaggagattaaaagccagtttgaaggctttgtgaaggatataatgttaaacaaagaggagacgaagaaagaaaacagctttgaaatgcaaaaaggtgatcagaatcctcaaattgcggcacatgtcataagtgaggccagcagtaaaacaacatctgtgttacagtgggctgaaaaaggatactacaccatgagcaacaacttggtaaccctggaaaatgggaaacagctgaccgttaaaagacaaggactctattatatctatgcccaagtcaccttctgttccaatcgggaagcttcgagtcaagctccatttatagccagcctctgcctaaagtcccccggtagattcgagagaatcttactcagagctgcaaatacccacagttccgccaaaccttgcgggcaacaatccattcacttgggaggagtatttgaattgcaaccaggtgcttcggtgtttgtcaatgtgactgatccaagccaagtgagccatggcactggcttcacgtcctttggcttactcaaactctgaacagtgtcaccttgcaggctgtggtggagctgacgctgggagtcttcataatacagcacagcggttaagcccaccccctgttaactgcctatttataaccctaggatcctccttatggagaactatttattatacactccaaggcatgtagaactgtaataagtgaattacaggtcacatgaaaccaaaacgggccctgctccataagagcttatatatctgaagcagcaaccccactgatgcagacatccagagagtcctatgaaaagacaaggccattatgcacaggttgaattctgagtaaacagcagataacttgccaagttcagttttgtttctttgcgtgcagtgtctttccatggataatgcatttgatttatcagtgaagatgcagaagggaaatggggagcctcagctcacattcagttatggttgactctgggttcctatggccttgttggagggggccaggctctagaacgtctaacacagtggagaaccgaaaccccccccccccccccgccaccctctcggacagttattcattctctttcaatctctctctctccatctctctctttcagtctctctctctcaacctctttcttccaatctctctttctcaatctctctgtttccctttgtcagtctcttccctcccccagtctctcttctcaatccccctttctaacacacacacacacacacacacacacacacacacacacacacacacacacacagagtcaggccgttgctagtcagttctcttctttccaccctgtccctatctctaccactatagatgagggtgaggagtagggagtgcagccctgagcctgcccactcctcattacgaaatgactgtatttaaaggaaatctattgtatctacctgcagtctccattgtttccagagtgaacttgtaattatcttgttatttattttttgaataataaagacctcttaacattaa

SEQ ID NO: 62 - protein, 182 aa, Homo sapiens
MEQGKGLAVLILAIILLQGTLAQSIKGNHLVKVYDYQEDGSVLLTCDAEAKNITWFKDGKMIGFLTEDKKKWNLGSNAKDPRGMYQCKGSQNKSKPLQVYYRMCQNCIELNAATISGFLFAEIVSIFVLAVGVYFIAGQDGVRQSRASDKQTLLPNDQLYQPLKDREDDQYSHLQGNQLRRN

SEQ ID NO: 63 - protein, 150 aa, Homo sapiens
FKIPIEELEDRVFVNCNTSITWVEGTVGTLLSDITRLDLGKRILDPRGIYRCNGTDIYKDKESTVQVHYRMCQSCVELDPATVAGIIVTDVIATLLLALGVFCFAGHETGRLSGAADTQALLRNDQVYQPLRDRDDAQYSHLGGNWARNK

SEQ ID NO: 64 - protein, 106 aa, Homo sapiens
FKIPIEELEDRVFVNCNTSITWVEGTVGTLLSDITRLDLGKRILDPRGIYRCNGTDIYKDKESTVQVHYRTADTQALLRNDQVYQPLRDRDDAQYSHLGGNWARNK

SEQ ID NO: 65 - protein, 185 aa, Homo sapiens
DGNEEMGGITQTPYKVSISGTTVILTCPQYPGSEILWQHNDKNIGGDEDDKNIGSDEDHLSLKEFSELEQSGYYVCYPRGSKPEDANFYLYLRARVCENCMEMDVMSVATIVIVDICITGGLLLLVYYWSKNRKAKAKPVTRGAGAGGRQRGQNKERPPPVPNPDYEPIRKGQRDLYSGLNQRRI

SEQ ID NO: 66 - protein, 143 aa, Homo sapiens
QSFGLLDPKLCYLLDGILFIYGVILTALFLRVKFSRSADAPAYQQGQNQLYNELNLGRREEYDVLDKRRGRDPEMGGKPQRRKNPQEGLYNELQKDKMAEAYSEIGMKGERRRGKGHDGLYQGLSTATKDTYDALHMQALPPR

SEQ ID NO: 67 - protein, 142 aa, Homo sapiens
QSFGLLDPKLCYLLDGILFIYGVILTALFLRVKFSRSADAPAYQQGQNQLYNELNLGRREEYDVLDKRRGRDPEMGGKPRRKNPQEGLYNELQKDKMAEAYSEIGMKGERRRGKGHDGLYQGLSTATKDTYDALHMQALPPR

SEQ ID NO: 68 - protein, 99 aa, Homo sapiens
MAAAAASRGVGAKLGLREIRIHLCQRSPGSQGVRDFIEKRYVELKKANPDLPILIRECSDVQPKLWARYAFGQETNVPLNNFSADQVTRALENVLSGKA

SEQ ID NO: 69 - protein, 297 aa, Homo sapiens
MTTPRNSVNGTFPAEPMKGPIAMQSGPKPLFRRMSSLVGPTQSFFMRESKTLGAVQIMNGLFHIALGGLLMIPAGIYAPICVTVWYPLWGGIMYIISGSLLAATEKNSRKCLVKGKMIMNSLSLFAAISGMILSIMDILNIKISHFLKMESLNFIRAHTPYINIYNCEPANPSEKNSPSTQYCYSIQSLFLGILSVMLIFAFFQELVIAGIVENEWKRTCSRPKSNIVLLSAEEKKEQTIEIKEEVVGLTETSSQPKNEEDIEIIPIQEEEEEETETNFPEPPQDQESSPIENDSSP

SEQ ID NO: 70 - protein, 251 aa, Homo sapiens
ELCDDDPPEIPHATFKAMAYKEGTMLNCECKRGFRRIKSGSLYMLCTGNSSHSSWDNQCQCTSSATRNTTKQVTPQPEEQKERKTTEMQSPMQPVDQASLPGHCREPPPWENEATERIYHFVVGQMVYYQCVQGYRALHRGPAESVCKMTHGKTRWTQPQLICTGEMETSQFPGEEKPQASPEGRPESETSCLVTTTDFQIQTEMAATMETSIFTTEYQVAVAGCVFLLISVLLLSGLTWQRRQRKSRRTI

SEQ ID NO: 71 - protein, 179 aa, Homo sapiens
ELCDDDPPEIPHATFKAMAYKEGTMLNCECKRGFRRIKSGSLYMLCTGNSSHSSWDNQCQCTSSATRNTTKQVTPQPEEQKERKTTEMQSPMQPVDQASLPGEEKPQASPEGRPESETSCLVTTTDFQIQTEMAATMETSIFTTEYQVAVAGCVFLLISVLLLSGLTWQRRQRKSRRTI

SEQ ID NO: 72 - protein, 155 aa, Homo sapiens
ELCDDDPPEIPHATFKAMAYKEGTMLNCECKRGFRRIKSGSLYMLCTGNSSHSSWDNQCQCTSSATRNTTKQVTPQPEEQKERKTTEMQSPMQPVDQASLPDFQIQTEMAATMETSIFTTEYQVAVAGCVFLLISVLLLSGLTWQRRQRKSRRTI

SEQ ID NO: 73 - protein, 202 aa, Homo sapiens
NKILVKQSPMLVAYDNAVNLSCKYSYNLFSREFRASLHKGLDSAVEVCVVYGNYSQQLQVYSKTGFNCDGKLGNESVTFYLQNLYVNQTDIYFCKIEVMYPPPYLDNEKSNGTIIHVKGKHLCPSPLFPGPSKPFWVLVVVGGVLACYSLLVTVAFIIFWVRSKRSRLLHSDYMNMTPRRPGPTRKHYQPYAPPRDFAAYRS

SEQ ID NO: 74 - protein, 105 aa, Homo sapiens
NKILVKQSPMLVAYDNAVNLSWKHLCPSPLFPGPSKPFWVLVVVGGVLACYSLLVTVAFIIFWVRSKRSRLLHSDYMNMTPRRPGPTRKHYQPYAPPRDFAAYRS

SEQ ID NO: 75 - protein, 83 aa, Homo sapiens
KHLCPSPLFPGPSKPFWVLVVVGGVLACYSLLVTVAFIIFWVRSKRSRLLHSDYMNMTPRRPGPTRKHYQPYAPPRDFAAYRS

SEQ ID NO: 76 - protein, 254 aa, Homo sapiens
VIHVTKEVKEVATLSCGHNVSVEELAQTRIYWQKEKKMVLTMMSGDMNIWPEYKNRTIFDITNNLSIVILALRPSDEGTYECVVLKYEKDAFKREHLAEVTLSVKADFPTPSISDFEIPTSNIRRIICSTSGGFPEPHLSWLENGEELNAINTTVSQDPETELYAVSSKLDFNMTTNHSFMCLIKYGHLRVNQTFNWNTTKQEHFPDNLLPSWAITLISVNGIFVICCLTYCFAPRCRERRRNERLRRESVRPV

SEQ ID NO: 77 - protein, 299 aa, Homo sapiens
YFNETADLPCQFANSQNQSLSELVVFWQDQENLVLNEVYLGKEKFDSVHSKYMGRTSFDSDSWTLRLHNLQIKDKGLYQCIIHHKKPTGMIRIHQMNSELSVLANFSQPEIVPISNITENVYINLTCSSIHGYPEPKKMSVLLRTKNSTIEYDGIMQKSQDNVTELYDVSISLSVSFPDVTSNMTIFCILETDKTRLLSSPFSIELEDPQPPPDHIPWITAVLPTVIICVMVFCLILWKWKKKKRPRNSYKCGTNTMEREESEQTKKREKIHIPERSDEAQRVFKSSKTSSCDKSDTCF

SEQ ID NO: 78 - protein, 299 aa, Homo sapiens; identical to SEQ ID NO: 77

SEQ ID NO: 79 - protein, 251 aa, Homo sapiens
YFNETADLPCQFANSQNQSLSELVVFWQDQENLVLNEVYLGKEKFDSVHSKYMGRTSFDSDSWTLRLHNLQIKDKGLYQCIIHHKKPTGMIRIHQMNSELSVLANFSQPEIVPISNITENVYINLTCSSIHGYPEPKKMSVLLRTKNSTIEYDGIMQKSQDNVTELYDVSISLSVSFPDVTSNMTIFCILETDKTRLLSSPFSIGTNTMEREESEQTKKREKIHIPERSDEAQRVFKSSKTSSCDKSDTCF

SEQ ID NO: 80 - protein, 190 aa, Homo sapiens
EIVPISNITENVYINLTCSSIHGYPEPKKMSVLLRTKNSTIEYDGIMQKSQDNVTELYDVSISLSVSFPDVTSNMTIFCILETDKTRLLSSPFSIELEDPQPPPDHIPWITAVLPTVIICVMVFCLILWKWKKKKRPRNSYKCGTNTMEREESEQTKKREKIHIPERSDEAQRVFKSSKTSSCDKSDTCF

SEQ ID NO: 81 - protein, 247 aa, Homo sapiens
MGRTSFDSDSWTLRLHNLQIKDKGLYQCIIHHKKPTGMIRIHQMNSELSVLANFSQPEIVPISNITENVYINLTCSSIHGYPEPKKMSVLLRTKNSTIEYDGIMQKSQDNVTELYDVSISLSVSFPDVTSNMTIFCILETDKTRLLSSPFSIELEDPQPPPDHIPWITAVLPTVIICVMVFCLILWKWKKKKRPRNSYKCGTNTMEREESEQTKKREKIHIPERSDEAQRVFKSSKTSSCDKSDTCF

SEQ ID NO: 82 - protein, 1181 aa, Homo sapiens
MGPERTGAAPLPLLLVLALSQGILNCCLAYNVGLPEAKIFSGPSSEQFGYAVQQFINPKGNWLLVGSPWSGFPENRMGDVYKCPVDLSTATCEKLNLQTSTSIPNVTEMKTNMSLGLILTRNMGTGGFLTCGPLWAQQCGNQYYTTGVCSDISPDFQLSASFSPATQPCPSLIDVVVVCDESNSIYPWDAVKNFLEKFVQGLDIGPTKTQVGLIQYANNPRVVFNLNTYKTKEEMIVATSQTSQYGGDLTNTFGAIQYARKYAYSAASGGRRSATKVMVVVTDGESHDGSMLKAVIDQCNHDNILRFGIAVLGYLNRNALDTKNLIKEIKAIASIPTERYFFNVSDEAALLEKAGTLGEQIFSIEGTVQGGDNFQMEMSQVGFSADYSSQNDILMLGAVGAFGWSGTIVQKTSHGHLIFPKQAFDQILQDRNHSSYLGYSVAAISTGESTHFVAGAPRANYTGQIVLYSVNENGNITVIQAHRGDQIGSYFGSVLCSVDVDKDTITDVLLVGAPMYMSDLKKEEGRVYLFTIKKGILGQHQFLEGPEGIENTRFGSAIAALSDINMDGFNDVIVGSPLENQNSGAVYIYNGHQGTIRTKYSQKILGSDGAFRSHLQYFGRSLDGYGDLNGDSITDVSIGAFGQVVQLWSQSIADVAIEASFTPEKITLVNKNAQIILKLCFSAKFRPTKQNNQVAIVYNITLDADGFSSRVTSRGLFKENNERCLQKNMVVNQAQSCPEHIIYIQEPSDVVNSLDLRVDISLENPGTSPALEAYSETAKVFSIPFHKDCGEDGLCISDLVLDVRQIPAAQEQPFIVSNQNKRLTFSVTLKNKRESAYNTGIVVDFSENLFFASFSLPVDGTEVTCQVAASQKSVACDVGYPALKREQQVTFTINFDFNLQNLQNQASLSFQALSESQEENKADNLVNLKIPLLYDAEIHLTRSTNINFYEISSDGNVPSIVHSFEDVGPKFIFSLKVTTGSVPVSMATVIIHIPQYTKEKNPLMYLTGVQTDKAGDISCNADINPLKIGQTSSSVSFKSENFRHTKELNCRTASCSNVTCWLKDVHMKGEYFVNVTTRIWNGTFASSTFQTVQLTAAAEINTYNPEIYVIEDNTVTIPLMIMKPDEKAEVPTGVIIGSIIAGILLLLALVAILWKLGFFKRKYEKMTKNPDEIDETTELSS

SEQ ID NO: 83 - protein, 469 aa, Homo sapiens
MHSFPPLLLLLFWGVVSHSFPATLETQEQDVDLVQKYLEKYYNLKNDGRQVEKRRNSGPVVEKLKQMQEFFGLKVTGKPDAETLKVMKQPRCGVPDVAQFVLTEGNPRWEQTHLTYRIENYTPDLPRADVDHAIEKAFQLWSNVTPLTFTKVSEGQADIMISFVRGDHRDNSPFDGPGGNLAHAFQPGPGIGGDAHFDEDERWTNNFREYNLHRVAAHELGHSLGLSHSTDIGALMYPSYTFSGDVQLAQDDIDGIQAIYGRSQNPVQPIGPQTPKACDSKLTFDAITTIRGEVMFFKDRFYMRTNPFYPEVELNFISVFWPQLPNGLEAAYEFADRDEVRFFKGNKYWAVQGQNVLHGYPKDIYSSFGFPRTVKHIDAALSEENTGKTYFFVANKYWRYDEYKRSMDPGYPKMIAHDFPGIGHKVDAVFMKDGFFYFFHGTRQYKFDPKTKRILTLQKANSWFNCRKN

SEQ ID NO: 84 - protein, 288 aa, Homo sapiens
MDPKQTTLLCLVLCLGQRIQAQEGDFPMPFISAKSSPVIPLDGSVKIQCQAIREAYLTQLMIIKNSTYREIGRRLKFWNETDPEFVIDHMDANKAGRYQCQYRIGHYRFRYSDTLELVVTGLYGKPFLSADRGLVLMPGENISLTCSSAHIPFDRFSLAKEGELSLPQHQSGEHPANFSLGPVDLNVSGIYRCYGWYNRSPYLWSFPSNALELVVTDSIHQDYTTQNLIRMAVAGLVLVALLAILVENWHSHHTALNKEASADVAEPSWSQQMCQPGLTFARTPSVCK

SEQ ID NO: 85 - DNA, 2947 bp, Homo sapiens
agtaaccaggcaacaccattgaaggctcatatgtaaaaatccatgccttcctttctcccaatctccattcccaaacttagccactggcttctggctgaggccttacgcatacctcccggggcttgcacacaccttcttctacagaagacacaccttgggcatatcctacagaagaccaggcttctctctggtccttggtagagggctactttactgtaacagggccagggtggagagttctctcctgaagctccatcccctctataggaaatgtgttgacaatattcagaagagtaagaggatcaagacttctttgtgctcaaataccactgttctcttctctaccctgccctaaccaggagcttgtcaccccaaactctgaggtgatttatgccttaatcaagcaaacttccctcttcagaaaagatggctcattttccctcaaaagttgccaggagctgccaagtattctgccaattcaccctggagcacaatcaacaaattcagccagaacacaactacagctactattagaactattattattaataaattcctctccaaatctagccccttgacttcggatttcacgatttctcccttcctcctagaaacttgataagtttcccgcgcttccctttttctaagactacatgtttgtcatcttataaagcaaaggggtgaataaatgaaccaaatcaataacttctggaatatctgcaaacaacaataatatcagctatgccatctttcactattttagccagtatcgagttgaatgaacatagaaaaatacaaaactgaattcttccctgtaaattccccgttttgacgacgcacttgtagccacgtagccacgcctacttaagacaattacaaaaggcgaagaagactgactcaggcttaagctgccagccagagagggagtcatttcattggcgtttgagtcagcaaagaagtcaagatggccaaagttccagacatgtttgaagacctgaagaactgttacagtgaaaatgaagaagacagttcctccattgatcatctgtctctgaatcagaaatccttctatcatgtaagctatggcccactccatgaaggctgcatggatcaatctgtgtctctgagtatctctgaaacctctaaaacatccaagcttaccttcaaggagagcatggtggtagtagcaaccaacgggaaggttctgaagaagagacggttgagtttaagccaatccatcactgatgatgacctggaggccatcgccaatgactcagaggaagaaatcatcaagcctaggtcagcaccttttagcttcctgagcaatgtgaaatacaactttatgaggatcatcaaatacgaattcatcctgaatgacgccctcaatcaaagtataattcgagccaatgatcagtacctcacggctgctgcattacataatctggatgaagcagtgaaatttgacatgggtgcttataagtcatcaaaggatgatgctaaaattaccgtgattctaagaatctcaaaaactcaattgtatgtgactgcccaagatgaagaccaaccagtgctgctgaaggagatgcctgagatacccaaaaccatcacaggtagtgagaccaacctcctcttcttctgggaaactcacggcactaagaactatttcacatcagttgcccatccaaacttgtttattgccacaaagcaagactactgggtgtgcttggcaggggggccaccctctatcactgactttcagatactggaaaaccaggcgtaggtctggagtctcacttgtctcacttgtgcagtgttgacagttcatatgtaccatgtacatgaagaagctaaatcctttactgttagtcatttgctgagcatgtactgagccttgtaattctaaatgaatgtttacactctttgtaagagtggaaccaacactaacatataatgttgttatttaaagaacaccctatattttgcatagtaccaatcattttaattattattcttcataacaattttaggaggaccagagctactgactatggctaccaaaaagactctacccatattacagatgggcaaattaaggcataagaaaactaagaaatatgcacaatagcagttgaaacaagaagccacagacctaggatttcatgatttcatttcaactgtttgccttctacttttaagttgctgatgaactcttaatcaaatagcataagtttctgggacctcagttttatcattttcaaaatggagggaataatacctaagccttcctgccgcaacagttttttatgctaatcagggaggtcattttggtaaaatacttcttgaagccgagcctcaagatgaaggcaaagcacgaaatgttattttttaattattatttatatatgtatttataaatatatttaagataattataatatactatatttatgggaaccccttcatcctctgagtgtgaccaggcatcctccacaatagcagacagtgttttctgggataagtaagtttgatttcattaatacagggcattttggtccaagttgtgcttatcccatagccaggaaactctgcattctagtacttgggagacctgtaatcatataataaatgtacattaattaccttgagccagtaattggtccgatctttgactcttttgccattaaacttacctgggcattcttgtttcaattccacctgcaatcaagtcctacaagctaaaattagatgaactcaactttgacaaccatgagaccactgttatcaaaactttcttttctggaatgtaatcaatgtttcttctaggttctaaaaattgtgatcagaccataatgttacattattatcaacaatagtgattgatagagtgttatcagtcataactaaataaagcttgcaacaaaattctctgacaaaaaaaaaaaaaaaa

SEQ ID NO: 86 - DNA, 1498 bp, Homo sapiens
accaaacctcttcgaggcacaaggcacaacaggctgctctgggattctcttcagccaatcttcattgctcaagtgtctgaagcagccatggcagaagtacctgagctcgccagtgaaatgatggcttattacagtggcaatgaggatgacttgttctttgaagctgatggccctaaacagatgaagtgctccttccaggacctggacctctgccctctggatggcggcatccagctacgaatctccgaccaccactacagcaagggcttcaggcaggccgcgtcagttgttgtggccatggacaagctgaggaagatgctggttccctgcccacagaccttccaggagaatgacctgagcaccttctttcccttcatctttgaagaagaacctatcttcttcgacacatgggataacgaggcttatgtgcacgatgcacctgtacgatcactgaactgcacgctccgggactcacagcaaaaaagcttggtgatgtctggtccatatgaactgaaagctctccacctccagggacaggatatggagcaacaagtggtgttctccatgtcctttgtacaaggagaagaaagtaatgacaaaatacctgtggccttgggcctcaaggaaaagaatctgtacctgtcctgcgtgttgaaagatgataagcccactctacagctggagagtgtagatcccaaaaattacccaaagaagaagatggaaaagcgatttgtcttcaacaagatagaaatcaataacaagctggaatttgagtctgcccagttccccaactggtacatcagcacctctcaagcagaaaacatgcccgtcttcctgggagggaccaaaggcggccaggatataactgacttcaccatgcaatttgtgtcttcctaaagagagctgtacccagagagtcctgtgctgaatgtggactcaatccctagggctggcagaaagggaacagaaaggtttttgagtacggctatagcctggactttcctgttgtctacaccaatgcccaactgcctgccttagggtagtgctaagaggatctcctgtccatcagccaggacagtcagctctctcctttcagggccaatccccagcccttttgttgagccaggcctctctcacctctcctactcacttaaagcccgcctgacagaaaccacggccacatttggttctaagaaaccctctgtcattcgctcccacattctgatgagcaaccgcttccctatttatttatttatttgtttgtttgttttattcattggtctaatttattcaaagggggcaagaagtagcagtgtctgtaaaagagcctagtttttaatagctatggaatcaattcaatttggactggtgtgctctctttaaatcaagtcctttaattaagactgaaaatatataagctcagattatttaaatgggaatatttataaatgagcaaatatcatactgttcaatggttctgaaataaacttcactgaag

SEQ ID NO: 87 - DNA, 1163 bp, Homo sapiens
attctctccccagcttgctgagccctttgctcccctggcgactgcctggacagtcagcaaggaattgtctcccagtgcattttgccctcctggctgccaactctggctgctaaagcggctgccacctgctgcagtctacacagcttcgggaagaggaaaggaacctcagaccttccagatcgcttcctctcgcaacaaactatttgtcgcaggaataaagatggctgctgaaccagtagaagacaattgcatcaactttgtggcaatgaaatttattgacaatacgctttactttatagctgaagatgatgaaaacctggaatcagattactttggcaagcttgaatctaaattatcagtcataagaaatttgaatgaccaagttctcttcattgaccaaggaaatcggcctctatttgaagatatgactgattctgactgtagagataatgcaccccggaccatatttattataagtatgtataaagatagccagcctagaggtatggctgtaactatctctgtgaagtgtgagaaaatttcaactctctcctgtgagaacaaaattatttcctttaaggaaatgaatcctcctgataacatcaaggatacaaaaagtgacatcatattctttcagagaagtgtcccaggacatgataataagatgcaatttgaatcttcatcatacgaaggatactttctagcttgtgaaaaagagagagacctttttaaactcattttgaaaaaagaggatgaattgggggatagatctataatgttcactgttcaaaacgaagactagctattaaaatttcatgccgggcgcagtggctcacgcctgtaatcccagccctttgggaggctgaggcgggcagatcaccagaggtcaggtgttcaagaccagcctgaccaacatggtgaaacctcatctctactaaaaatacaaaaaattagctgagtgtagtgacgcatgccctcaatcccagctactcaagaggctgaggcaggagaatcacttgcactccggaggtagaggttgtggtgagccgagattgcaccattgcgctctagcctgggcaacaacagcaaaactccatctcaaaaaataaaataaataaataaacaaataaaaaattcataatgtgaaaaaaaaaaaaaaaaaa

SEQ ID NO: 88 - DNA, 1151 bp, Homo sapiens
attctctccccagcttgctgagccctttgctcccctggcgactgcctggacagtcagcaaggaattgtctcccagtgcattttgccctcctggctgccaactctggctgctaaagcggctgccacctgctgcagtctacacagcttcgggaagaggaaaggaacctcagaccttccagatcgcttcctctcgcaacaaactatttgtcgcaggaataaagatggctgctgaaccagtagaagacaattgcatcaactttgtggcaatgaaatttattgacaatacgctttactttatagaaaacctggaatcagattactttggcaagcttgaatctaaattatcagtcataagaaatttgaatgaccaagttctcttcattgaccaaggaaatcggcctctatttgaagatatgactgattctgactgtagagataatgcaccccggaccatatttattataagtatgtataaagatagccagcctagaggtatggctgtaactatctctgtgaagtgtgagaaaatttcaactctctcctgtgagaacaaaattatttcctttaaggaaatgaatcctcctgataacatcaaggatacaaaaagtgacatcatattctttcagagaagtgtcccaggacatgataataagatgcaatttgaatcttcatcatacgaaggatactttctagcttgtgaaaaagagagagacctttttaaactcattttgaaaaaagaggatgaattgggggatagatctataatgttcactgttcaaaacgaagactagctattaaaatttcatgccgggcgcagtggctcacgcctgtaatcccagccctttgggaggctgaggcgggcagatcaccagaggtcaggtgttcaagaccagcctgaccaacatggtgaaacctcatctctactaaaaatacaaaaaattagctgagtgtagtgacgcatgccctcaatcccagctactcaagaggctgaggcaggagaatcacttgcactccggaggtagaggttgtggtgagccgagattgcaccattgcgctctagcctgggcaacaacagcaaaactccatctcaaaaaataaaataaataaataaacaaataaaaaattcataatgtgaaaaaaaaaaaaaaaaaa

SEQ ID NO: 89 - DNA, 888 bp, Homo sapiens
aaaacccaagtgcagtagaagccattgttcataatggtagggatacagggtccttcgtaacagattatcagtgtggcctatgctggaaagtctggtgacctctgattttttttgcttccaggtctttggccttggcactctttgtcatattagagttcctgggtctaggcctgggcaggattcataggtgcagctgcttctgctggaggtagactgcatccaacaaagtaagggtgctgggtgagttctgggagtatagattctgactggggtcactgctgggctggccgccagtctttcatctgacccagggttaaactgtggcttgggactgactcaggtcctctcttggggtcggtctgcacataaaaggactcctatccttggcagttctgaaacaacaccaccacaatggaaaaagcattgaaaattgacacacctcagcaggggagcattcaggatatcaatcatcgggtgtgggttcttcaggaccagacgctcatagcagtcccgaggaaggaccgtatgtctccagtcactattgccttaatctcatgccgacatgtggagacccttgagaaagacagagggaaccccatctacctgggcctgaatggactcaatctctgcctgatgtgtgctaaagtcggggaccagcccacactgcagctgaaggaaaaggatataatggatttgtacaaccaacccgagcctgtgaagtcctttctcttctaccacagccagagtggcaggaactccaccttcgagtctgtggctttccctggctggttcatcgctgtcagctctgaaggaggctgtcctctcatccttacccaagaactggggaaagccaacactactgactttgggttaactatgctgttttaa

SEQ ID NO: 90 - DNA, 1186 bp, Homo sapiens
cacgggttcctccccactctgtctttctcacctctccttcacttttcctagcctcctcaccaccatctgatctatcttgttctcttcacaaaaggctctgaagacatcatgaacccacaacgggaggcagcacccaaatcctatgctattcgtgattctcgacagatggtgtgggtcctgagtggaaattctttaatagcagctcctcttagccgcagcattaagcctgtcactcttcatttaatagcctgtagagacacagaattcagtgacaaggaaaagggtaatatggtttacctgggaatcaagggaaaagatctctgtctcttctgtgcagaaattcagggcaagcctactttgcagcttaagcttcagggctcccaagataacatagggaaggacacttgctggaaactagttggaattcacacatgcataaacctggatgtgagagagagctgcttcatgggaacccttgaccaatggggaataggagtgggtagaaagaagtggaagagttcctttcaacatcaccatctcaggaagaaggacaaagatttctcatccatgcggaccaacataggaatgccaggaaggatgtagaaataaggggaggaagattcccatctctacaatctttgagtgggtttgctatcaatgaaatgctacaaatggaataagttgcagaaatttttctcttttcttgggttctggagagtttgtaaaacaaggacactatgtatttttaaagagttggtaaatcttacctgtaaagctagagaaggtcggagtctttttaggagtagatttggactacataacctgtaaatgtgttttgtccagtccttagagtgttttttaaaaaattgtaaagtcaaggttttcatgaaaaatgggaagatcagacaacattgctcctgaattcccacagagcagcaagctactagagctcaatctgttatttcttttcctgatgtacaggggttaagtcctatggaagaaacagcagaattattcaaaattatttacataatgtgcaattattcactagagcatgaggagtgaaacgctctgtttagtatgtataacttaaaaggaacacatacaattaaaagtaattgaaagacatttcttcttaaaaattctataatcttacactggtaaaataaactagtttttcccatgt

SEQ ID NO: 91 - DNA, 1068 bp, Homo sapiens
cacgggttcctccccactctgtctttctcacctctccttcacttttcctagcctcctcaccaccatctgatctatcttgttctcttcacaaaaggctctgaagacatcatgaacccacaacgggaggcagcacccaaatcctatgctattcgtgattctcgacagatggtgtgggtcctgagtggaaattctttaatagcagctcctcttagccgcagcattaagcctgtcactcttcatttaatagcctgtagagacacagaattcagtgacaaggaaaagggtaatatggtttacctgggaatcaagggaaaagatctctgtctcttctgtgcagaaattcagggcaagcctactttgcagcttaaggaaaaaaatatcatggacctgtatgtggagaagaaagcacagaagccctttctctttttccacaataaagaaggctccacttctgtctttcagtcagtctcttaccctggctggttcatagccacctccaccacatcaggacagcccatctttctcaccaaggagagaggcataactaataacactaacttctacttagattctgtggaataaatccagcctaggctgtgggtggctggttccaggatagagaatcaagctgtcagagtcatcttaacagatcattatgcgactgagttcactagcagttcagcccatccatagcttacctcattcttactatccaaaagccacctcctcctccaaacatccatttctgtaccaagaccctcactcgaatgtcactatcccaagatgaaacctaaaaatcactttccattctttcttgatcttaccccaccatccactcagctgccatgcccagtttagtcaaccccccaaatgctgcttcatgcaaccttccattcctattccttttgccaacccatgatgtagagatgtggattcatgacattttgttcatacaacttcttcaataaaacattataatatgtgccccaaagataaagctgaagaatgagatgaatgtgaaattaaaggtttgcatgtctttctaatcctaaaaaaaaaaaaaaaaaa

SEQ ID NO: 92 - DNA, 1212 bp, Homo sapiens
gaagctgctggagccacgattcagtcccctggactgtagataaagaccctttcttgccaggtgctgagacaaccacactatgagaggcactccaggagacgctgatggtggaggaagggccgtctatcaatcaatgtgtaaacctattactgggactattaatgatttgaatcagcaagtgtggacccttcagggtcagaaccttgtggcagttccacgaagtgacagtgtgaccccagtcactgttgctgttatcacatgcaagtatccagaggctcttgagcaaggcagaggggatcccatttatttgggaatccagaatccagaaatgtgtttgtattgtgagaaggttggagaacagcccacattgcagctaaaagagcagaagatcatggatctgtatggccaacccgagcccgtgaaacccttccttttctaccgtgccaagactggtaggacctccacccttgagtctgtggccttcccggactggttcattgcctcctccaagagagaccagcccatcattctgacttcagaacttgggaagtcatacaacactgcctttgaattaaatataaatgactgaactcagcctagaggtggcagcttggtctttgtcttaaagtttctggttcccaatgtgttttcgtctacattttcttagtgtcattttcacgctggtgctgagacaggggcaaggctgctgttatcatctcattttataatgaagaagaagcaattacttcatagcaactgaagaacaggatgtggcctcagaagcaggagagctgggtggtataaggctgtcctctcaagctggtgctgtgtaggccacaaggcatctgcatgagtgactttaagactcaaagaccaaacactgagctttcttctaggggtgggtatgaagatgcttcagagctcatgcgcgttacccacgatggcatgactagcacagagctgatctctgtttctgttttgctttattccctcttgggatgatatcatccagtctttatatgttgccaatatacctcattgtgtgtaatagaaccttcttagcattaagaccttgtaaacaaaaataattcttgtgttaagttaaatcatttttgtcctaattgtaatgtgtaatcttaaagttaaataaactttgtgtatttatataataataaagctaaaactgatataaaataaagaaagagtaaactg

SEQ ID NO: 93 - DNA, 1107 bp, Homo sapiens
gaagctgctggagccacgattcagtcccctggactgtagataaagaccctttcttgccaggtgctgagacaaccacactatgagaggcactccaggagacgctgatggtggaggaagggccgtctatcaatcaatcactgttgctgttatcacatgcaagtatccagaggctcttgagcaaggcagaggggatcccatttatttgggaatccagaatccagaaatgtgtttgtattgtgagaaggttggagaacagcccacattgcagctaaaagagcagaagatcatggatctgtatggccaacccgagcccgtgaaacccttccttttctaccgtgccaagactggtaggacctccacccttgagtctgtggccttcccggactggttcattgcctcctccaagagagaccagcccatcattctgacttcagaacttgggaagtcatacaacactgcctttgaattaaatataaatgactgaactcagcctagaggtggcagcttggtctttgtcttaaagtttctggttcccaatgtgttttcgtctacattttcttagtgtcattttcacgctggtgctgagacaggggcaaggctgctgttatcatctcattttataatgaagaagaagcaattacttcatagcaactgaagaacaggatgtggcctcagaagcaggagagctgggtggtataaggctgtcctctcaagctggtgctgtgtaggccacaaggcatctgcatgagtgactttaagactcaaagaccaaacactgagctttcttctaggggtgggtatgaagatgcttcagagctcatgcgcgttacccacgatggcatgactagcacagagctgatctctgtttctgttttgctttattccctcttgggatgatatcatccagtctttatatgttgccaatatacctcattgtgtgtaatagaaccttcttagcattaagaccttgtaaacaaaaataattcttgtgttaagttaaatcatttttgtcctaattgtaatgtgtaatcttaaagttaaataaactttgtgtatttatataataataaagctaaaactgatataaaataaagaaagagtaaactg

SEQ ID NO: 94 - DNA, 1366 bp, Homo sapiens
ggcagtgggactgggtttgagctgggcttatcctccaactgtgagggaggctacagcacactccaccccactctcagggctgggaattgttgtggctcagctatttgggggaatctgttttccagtttctcagaaccagcgcaagcacacacatcccaggctcacacccctggtggctggacttgctcccggatagcctcagtcagggagaggcagagctgcctggagcctgctgggctggtggaagccttggtggattctggcaggccaattatagacgaatggcctggggaacccgtgcagcccttggctgagtggttctaagccccagcacgtctgcctctggcttcacccagcctccttttctaactgcccttctctcctccccatcagtgaggaccagacaccactgattgcaggaatgtgttccctccccatggcaagatactacataattaaatatgcagaccagaaggctctatacacaagagatggccagctgctggtgggagatcctgttgcagacaactgctgtgcagagaagatctgcatacttcctaacagaggcttggcccgcaccaaggtccccattttcctggggatccagggagggagccgctgcctggcatgtgtggagacagaagaggggccttccctacagctggaggatgtgaacattgaggaactgtacaaaggtggtgaagaggccacacgcttcaccttcttccagagcagctcaggctccgccttcaggcttgaggctgctgcctggcctggctggttcctgtgtggcccggcagagccccagcagccagtacagctcaccaaggagagtgagccctcagcccgtaccaagttttactttgaacagagctggtagggagacaggaaactgcgttttagccttgtgcccccaaaccaagctcatcctgctcagggtctatggtaggcagaataatgtcccccgaaatatgtccacatcctaatcccaagatctgtgcatatgttaccatacatgtccaaagaggttttgcaaatgtgattatgttaaggatcttgaaatgaggagacaatcctgggttatccttgtgggctcagtttaatcacaagaaggaggcaggaagggagagtcagagagagaatggaagataccatgcttctaattttgaagatggagtgaggggccttgagccaacaaatgcaggtgtttttagaaggtggaaaagccaagggaacggattctcctctagagtctccggaaggaacacagctcttgacacatggatttcagctcagtgacacccatttcagacttctgacctccacaactataaaataataaacttgtgttattgtaaacctctaa

SEQ ID NO: 95 - DNA, 1027 bp, Homo sapiens
agttggagtctccagggatcagggttccaggaactcaggatctgcagtgaggaccagacaccactgattgcaggaatgtgttccctccccatggcaagatactacataattaaatatgcagaccagaaggctctatacacaagagatggccagctgctggtgggagatcctgttgcagacaactgctgtgcagagaagatctgcatacttcctaacagaggcttggcccgcaccaaggtccccattttcctggggatccagggagggagccgctgcctggcatgtgtggagacagaagaggggccttccctacagctggaggatgtgaacattgaggaactgtacaaaggtggtgaagaggccacacgcttcaccttcttccagagcagctcaggctccgccttcaggcttgaggctgctgcctggcctggctggttcctgtgtggcccggcagagccccagcagccagtacagctcaccaaggagagtgagccctcagcccgtaccaagttttactttgaacagagctggtagggagacaggaaactgcgttttagccttgtgcccccaaaccaagctcatcctgctcagggtctatggtaggcagaataatgtcccccgaaatatgtccacatcctaatcccaagatctgtgcatatgttaccatacatgtccaaagaggttttgcaaatgtgattatgttaaggatcttgaaatgaggagacaatcctgggttatccttgtgggctcagtttaatcacaagaaggaggcaggaagggagagtcagagagagaatggaagataccatgcttctaattttgaagatggagtgaggggccttgagccaacaaatgcaggtgtttttagaaggtggaaaagccaagggaacggattctcctctagagtctccggaaggaacacagctcttgacacatggatttcagctcagtgacacccatttcagacttctgacctccacaactataaaataataaacttgtgttattgtaaacctctaaaaaaaaa

SEQ ID NO: 96 - DNA, 2718 bp, Homo sapiens
agtctacagactcctccgaacacagagctgcagctcttcagggaagaaatcaaaacaagatcacaagaatactgaaaaatgaagcctaaaatgaagtattcaaccaacaaaatttccacagcaaagtggaagaacacagcaagcaaagccttgtgtttcaagctgggaaaatcccaacagaaggccaaagaagtttgccccatgtactttatgaagctccgctctggccttatgataaaaaaggaggcctgttactttaggagagaaaccaccaaaaggccttcactgaaaacaggtagaaagcacaaaagacatctggtactcgctgcctgtcaacagcagtctactgtggagtgctttgcctttggtatatcaggggtccagaaatatactagagcacttcatgattcaagtatcacaggaatttcacctattacagagtatcttgcttctctaagcacatacaatgatcaatccattacttttgctttggaggatgaaagttatgagatatatgttgaagacttgaaaaaagatgaaaagaaagataaggtgttactgagttactatgagtctcaacacccctcaaatgaatcaggtgacggtgttgatggtaagatgttaatggtaaccctgagtcctacaaaagacttctggttgcatgccaacaacaaggaacactctgtggagctccataagtgtgaaaaaccactgccagaccaggccttctttgtccttcataatatgcactccaactgtgtttcatttgaatgcaagactgatcctggagtgtttataggtgtaaaggataatcatcttgctctgattaaagtagactcttctgagaatttgtgtactgaaaatatcttgtttaagctctctgaaacttagttgatggaaacctgtgagtcttgggttgagtacccaaatgctaccactggagaaggaatgagagataaagaaagagacaggtgacatctaagggaaatgaagagtgcttagcatgtgtggaatgttttccatattatgtataaaaatattttttctaatcctccagttattcttttatttccctctgtataactgcatcttcaatacaagtatcagtatattaaatagggtattggtaaagaaacggtcaacattctaaagagatacagtctgacctttacttttctctagtttcagtccagaaagaacttcatatttagagctaaggccactgaggaaagagccatagcttaagtctctatgtagacagggatccattttaaagagctacttagagaaataattttccacagttccaaacgataggctcaaacactagagctgctagtaaaaagaagaccagatgcttcacagaattatcattttttcaactggaataaaacaccaggtttgtttgtagatgtcttaggcaacactcagagcagatctcccttactgtcaggggatatggaacttcaaaggcccacatggcaagccaggtaacataaatgtgtgaaaaagtaaagataactaaaaaatttagaaaaataaatccagtatttgtaaagtgaataacttcatttctaattgtttaatttttaaaattctgatttttatatattgagtttaagcaaggcattcttacacgaggaagtgaagtaaattttagttcagacataaaatttcacttattaggaatatgtaacatgctaaaacttttttttttttaaagagtactgagtcacaacatgttttagagcatccaagtaccatataatccaactatcatggtaaggccagaaatcttctaacctaccagagcctagatgagacaccgaattaacattaaaatttcagtaactgactgtccctcatgtccatggcctaccatcccttctgaccctggcttccagggacctatgtcttttaatactcactgtcacattgggcaaagttgcttctaatccttatttcccatgtgcacaagtctttttgtattccagcttcctgataacactgcttactgtggaatattcatttgacatctgtctcttttcatttcttttaactaccatgcccttgatatatcttttgcacctgctgaacttcatttctgtatcacctgacctctggatgccaaaacgtttattctgctttgtctgttgtagaattttagataaagctattaatggcaatatttttttgctaaacgtttttgttttttactgtcactagggcaataaaatttatactcaaccatataataacattttttaactactaaaggagtagtttttattttaaagtcttagcaatttctattacaacttttcttagacttaacacttatgataaatgactaacatagtaacagaatctttatgaaatatgaccttttctgaaaatacatacttttacatttctactttattgagacctattagatgtaagtgctagtagaatataagataaaagaggctgagaattaccatacaagggtattacaactgtaaaacaatttatctttgtttcattgttctgtcaataattgttaccaaagagataaaaataaaagcagaatgtatatcatcccatctgaaaaacactaattattgacatgtgcatctgtacaataaacttaaaatgattattaaataatcaaatatatctactacattgtttatattattgaataaagtatattttccaaatgtaaaaaaaaaaaaa

SEQ ID NO: 97 - DNA, 2592 bp, Homo sapiens
agtctacagactcctccgaacacagagctgcagctcttcagggaagaaatcaaaacaagatcacaagaatactgaaaaatgaagcctaaaatgaagtattcaaccaacaaaatttccacagcaaagtggaagaacacagcaagcaaagccttgtgtttcaagctgggaaaatcccaacagaaggccaaagaagtttgccccatgtactttatgaagctccgctctggccttatgataaaaaaggaggcctgttactttaggagagaaaccaccaaaaggccttcactgaaaacaggtagaaagcacaaaagacatctggtactcgctgcctgtcaacagcagtctactgtggagtgctttgcctttggtatatcaggggtccagaaatatactagagcacttcatgattcaagtatcacagataaggtgttactgagttactatgagtctcaacacccctcaaatgaatcaggtgacggtgttgatggtaagatgttaatggtaaccctgagtcctacaaaagacttctggttgcatgccaacaacaaggaacactctgtggagctccataagtgtgaaaaaccactgccagaccaggccttctttgtccttcataatatgcactccaactgtgtttcatttgaatgcaagactgatcctggagtgtttataggtgtaaaggataatcatcttgctctgattaaagtagactcttctgagaatttgtgtactgaaaatatcttgtttaagctctctgaaacttagttgatggaaacctgtgagtcttgggttgagtacccaaatgctaccactggagaaggaatgagagataaagaaagagacaggtgacatctaagggaaatgaagagtgcttagcatgtgtggaatgttttccatattatgtataaaaatattttttctaatcctccagttattcttttatttccctctgtataactgcatcttcaatacaagtatcagtatattaaatagggtattggtaaagaaacggtcaacattctaaagagatacagtctgacctttacttttctctagtttcagtccagaaagaacttcatatttagagctaaggccactgaggaaagagccatagcttaagtctctatgtagacagggatccattttaaagagctacttagagaaataattttccacagttccaaacgataggctcaaacactagagctgctagtaaaaagaagaccagatgcttcacagaattatcattttttcaactggaataaaacaccaggtttgtttgtagatgtcttaggcaacactcagagcagatctcccttactgtcaggggatatggaacttcaaaggcccacatggcaagccaggtaacataaatgtgtgaaaaagtaaagataactaaaaaatttagaaaaataaatccagtatttgtaaagtgaataacttcatttctaattgtttaatttttaaaattctgatttttatatattgagtttaagcaaggcattcttacacgaggaagtgaagtaaattttagttcagacataaaatttcacttattaggaatatgtaacatgctaaaacttttttttttttaaagagtactgagtcacaacatgttttagagcatccaagtaccatataatccaactatcatggtaaggccagaaatcttctaacctaccagagcctagatgagacaccgaattaacattaaaatttcagtaactgactgtccctcatgtccatggcctaccatcccttctgaccctggcttccagggacctatgtcttttaatactcactgtcacattgggcaaagttgcttctaatccttatttcccatgtgcacaagtctttttgtattccagcttcctgataacactgcttactgtggaatattcatttgacatctgtctcttttcatttcttttaactaccatgcccttgatatatcttttgcacctgctgaacttcatttctgtatcacctgacctctggatgccaaaacgtttattctgctttgtctgttgtagaattttagataaagctattaatggcaatatttttttgctaaacgtttttgttttttactgtcactagggcaataaaatttatactcaaccatataataacattttttaactactaaaggagtagtttttattttaaagtcttagcaatttctattacaacttttcttagacttaacacttatgataaatgactaacatagtaacagaatctttatgaaatatgaccttttctgaaaatacatacttttacatttctactttattgagacctattagatgtaagtgctagtagaatataagataaaagaggctgagaattaccatacaagggtattacaactgtaaaacaatttatctttgtttcattgttctgtcaataattgttaccaaagagataaaaataaaagcagaatgtatatcatcccatctgaaaaacactaattattgacatgtgcatctgtacaataaacttaaaatgattattaaataatcaaatatatctactacattgtttatattattgaataaagtatattttccaaatgtaaaaaaaaaaaaa

SEQ ID NO: 98 - DNA, 2340 bp, Homo sapiens
agtctacagactcctccgaacacagagctgcagctcttcagggaagaaatcaaaacaagatcacaagaatactgaaaaatgaagcctaaaatgaagtattcaaccaacaaaatttccacagcaaagtggaagaacacagcaagcaaagccttgtgtttcaagctgggaaataaggtgttactgagttactatgagtctcaacacccctcaaatgaatcaggtgacggtgttgatggtaagatgttaatggtaaccctgagtcctacaaaagacttctggttgcatgccaacaacaaggaacactctgtggagctccataagtgtgaaaaaccactgccagaccaggccttctttgtccttcataatatgcactccaactgtgtttcatttgaatgcaagactgatcctggagtgtttataggtgtaaaggataatcatcttgctctgattaaagtagactcttctgagaatttgtgtactgaaaatatcttgtttaagctctctgaaacttagttgatggaaacctgtgagtcttgggttgagtacccaaatgctaccactggagaaggaatgagagataaagaaagagacaggtgacatctaagggaaatgaagagtgcttagcatgtgtggaatgttttccatattatgtataaaaatattttttctaatcctccagttattcttttatttccctctgtataactgcatcttcaatacaagtatcagtatattaaatagggtattggtaaagaaacggtcaacattctaaagagatacagtctgacctttacttttctctagtttcagtccagaaagaacttcatatttagagctaaggccactgaggaaagagccatagcttaagtctctatgtagacagggatccattttaaagagctacttagagaaataattttccacagttccaaacgataggctcaaacactagagctgctagtaaaaagaagaccagatgcttcacagaattatcattttttcaactggaataaaacaccaggtttgtttgtagatgtcttaggcaacactcagagcagatctcccttactgtcaggggatatggaacttcaaaggcccacatggcaagccaggtaacataaatgtgtgaaaaagtaaagataactaaaaaatttagaaaaataaatccagtatttgtaaagtgaataacttcatttctaattgtttaatttttaaaattctgatttttatatattgagtttaagcaaggcattcttacacgaggaagtgaagtaaattttagttcagacataaaatttcacttattaggaatatgtaacatgctaaaacttttttttttttaaagagtactgagtcacaacatgttttagagcatccaagtaccatataatccaactatcatggtaaggccagaaatcttctaacctaccagagcctagatgagacaccgaattaacattaaaatttcagtaactgactgtccctcatgtccatggcctaccatcccttctgaccctggcttccagggacctatgtcttttaatactcactgtcacattgggcaaagttgcttctaatccttatttcccatgtgcacaagtctttttgtattccagcttcctgataacactgcttactgtggaatattcatttgacatctgtctcttttcatttcttttaactaccatgcccttgatatatcttttgcacctgctgaacttcatttctgtatcacctgacctctggatgccaaaacgtttattctgctttgtctgttgtagaattttagataaagctattaatggcaatatttttttgctaaacgtttttgttttttactgtcactagggcaataaaatttatactcaaccatataataacattttttaactactaaaggagtagtttttattttaaagtcttagcaatttctattacaacttttcttagacttaacacttatgataaatgactaacatagtaacagaatctttatgaaatatgaccttttctgaaaatacatacttttacatttctactttattgagacctattagatgtaagtgctagtagaatataagataaaagaggctgagaattaccatacaagggtattacaactgtaaaacaatttatctttgtttcattgttctgtcaataattgttaccaaagagataaaaataaaagcagaatgtatatcatcccatctgaaaaacactaattattgacatgtgcatctgtacaataaacttaaaatgattattaaataatcaaatatatctactacattgtttatattattgaataaagtatattttccaaatgtaaaaaaaaaaaaa

SEQ ID NO: 99 - DNA, 2705 bp, Homo sapiens
acagatgccaaacgagatggagagagggtgagtaggagcaaaatttctcatgagaatactgaaaaatgaagcctaaaatgaagtattcaaccaacaaaatttccacagcaaagtggaagaacacagcaagcaaagccttgtgtttcaagctgggaaaatcccaacagaaggccaaagaagtttgccccatgtactttatgaagctccgctctggccttatgataaaaaaggaggcctgttactttaggagagaaaccaccaaaaggccttcactgaaaacaggtagaaagcacaaaagacatctggtactcgctgcctgtcaacagcagtctactgtggagtgctttgcctttggtatatcaggggtccagaaatatactagagcacttcatgattcaagtatcacaggaatttcacctattacagagtatcttgcttctctaagcacatacaatgatcaatccattacttttgctttggaggatgaaagttatgagatatatgttgaagacttgaaaaaagatgaaaagaaagataaggtgttactgagttactatgagtctcaacacccctcaaatgaatcaggtgacggtgttgatggtaagatgttaatggtaaccctgagtcctacaaaagacttctggttgcatgccaacaacaaggaacactctgtggagctccataagtgtgaaaaaccactgccagaccaggccttctttgtccttcataatatgcactccaactgtgtttcatttgaatgcaagactgatcctggagtgtttataggtgtaaaggataatcatcttgctctgattaaagtagactcttctgagaatttgtgtactgaaaatatcttgtttaagctctctgaaacttagttgatggaaacctgtgagtcttgggttgagtacccaaatgctaccactggagaaggaatgagagataaagaaagagacaggtgacatctaagggaaatgaagagtgcttagcatgtgtggaatgttttccatattatgtataaaaatattttttctaatcctccagttattcttttatttccctctgtataactgcatcttcaatacaagtatcagtatattaaatagggtattggtaaagaaacggtcaacattctaaagagatacagtctgacctttacttttctctagtttcagtccagaaagaacttcatatttagagctaaggccactgaggaaagagccatagcttaagtctctatgtagacagggatccattttaaagagctacttagagaaataattttccacagttccaaacgataggctcaaacactagagctgctagtaaaaagaagaccagatgcttcacagaattatcattttttcaactggaataaaacaccaggtttgtttgtagatgtcttaggcaacactcagagcagatctcccttactgtcaggggatatggaacttcaaaggcccacatggcaagccaggtaacataaatgtgtgaaaaagtaaagataactaaaaaatttagaaaaataaatccagtatttgtaaagtgaataacttcatttctaattgtttaatttttaaaattctgatttttatatattgagtttaagcaaggcattcttacacgaggaagtgaagtaaattttagttcagacataaaatttcacttattaggaatatgtaacatgctaaaacttttttttttttaaagagtactgagtcacaacatgttttagagcatccaagtaccatataatccaactatcatggtaaggccagaaatcttctaacctaccagagcctagatgagacaccgaattaacattaaaatttcagtaactgactgtccctcatgtccatggcctaccatcccttctgaccctggcttccagggacctatgtcttttaatactcactgtcacattgggcaaagttgcttctaatccttatttcccatgtgcacaagtctttttgtattccagcttcctgataacactgcttactgtggaatattcatttgacatctgtctcttttcatttcttttaactaccatgcccttgatatatcttttgcacctgctgaacttcatttctgtatcacctgacctctggatgccaaaacgtttattctgctttgtctgttgtagaattttagataaagctattaatggcaatatttttttgctaaacgtttttgttttttactgtcactagggcaataaaatttatactcaaccatataataacattttttaactactaaaggagtagtttttattttaaagtcttagcaatttctattacaacttttcttagacttaacacttatgataaatgactaacatagtaacagaatctttatgaaatatgaccttttctgaaaatacatacttttacatttctactttattgagacctattagatgtaagtgctagtagaatataagataaaagaggctgagaattaccatacaagggtattacaactgtaaaacaatttatctttgtttcattgttctgtcaataattgttaccaaagagataaaaataaaagcagaatgtatatcatcccatctgaaaaacactaattattgacatgtgcatctgtacaataaacttaaaatgattattaaataatcaaatatatctactacattgtttatattattgaataaagtatattttccaaatgtaaaaaaaaaaaaa

SEQ ID NO: 100 - DNA, 2713 bp, Homo sapiens
aaatactacaattgctgactacaggaaacctcatcatctgagaccagcactttataaattagaatactgaaaaatgaagcctaaaatgaagtattcaaccaacaaaatttccacagcaaagtggaagaacacagcaagcaaagccttgtgtttcaagctgggaaaatcccaacagaaggccaaagaagtttgccccatgtactttatgaagctccgctctggccttatgataaaaaaggaggcctgttactttaggagagaaaccaccaaaaggccttcactgaaaacaggtagaaagcacaaaagacatctggtactcgctgcctgtcaacagcagtctactgtggagtgctttgcctttggtatatcaggggtccagaaatatactagagcacttcatgattcaagtatcacaggaatttcacctattacagagtatcttgcttctctaagcacatacaatgatcaatccattacttttgctttggaggatgaaagttatgagatatatgttgaagacttgaaaaaagatgaaaagaaagataaggtgttactgagttactatgagtctcaacacccctcaaatgaatcaggtgacggtgttgatggtaagatgttaatggtaaccctgagtcctacaaaagacttctggttgcatgccaacaacaaggaacactctgtggagctccataagtgtgaaaaaccactgccagaccaggccttctttgtccttcataatatgcactccaactgtgtttcatttgaatgcaagactgatcctggagtgtttataggtgtaaaggataatcatcttgctctgattaaagtagactcttctgagaatttgtgtactgaaaatatcttgtttaagctctctgaaacttagttgatggaaacctgtgagtcttgggttgagtacccaaatgctaccactggagaaggaatgagagataaagaaagagacaggtgacatctaagggaaatgaagagtgcttagcatgtgtggaatgttttccatattatgtataaaaatattttttctaatcctccagttattcttttatttccctctgtataactgcatcttcaatacaagtatcagtatattaaatagggtattggtaaagaaacggtcaacattctaaagagatacagtctgacctttacttttctctagtttcagtccagaaagaacttcatatttagagctaaggccactgaggaaagagccatagcttaagtctctatgtagacagggatccattttaaagagctacttagagaaataattttccacagttccaaacgataggctcaaacactagagctgctagtaaaaagaagaccagatgcttcacagaattatcattttttcaactggaataaaacaccaggtttgtttgtagatgtcttaggcaacactcagagcagatctcccttactgtcaggggatatggaacttcaaaggcccacatggcaagccaggtaacataaatgtgtgaaaaagtaaagataactaaaaaatttagaaaaataaatccagtatttgtaaagtgaataacttcatttctaattgtttaatttttaaaattctgatttttatatattgagtttaagcaaggcattcttacacgaggaagtgaagtaaattttagttcagacataaaatttcacttattaggaatatgtaacatgctaaaacttttttttttttaaagagtactgagtcacaacatgttttagagcatccaagtaccatataatccaactatcatggtaaggccagaaatcttctaacctaccagagcctagatgagacaccgaattaacattaaaatttcagtaactgactgtccctcatgtccatggcctaccatcccttctgaccctggcttccagggacctatgtcttttaatactcactgtcacattgggcaaagttgcttctaatccttatttcccatgtgcacaagtctttttgtattccagcttcctgataacactgcttactgtggaatattcatttgacatctgtctcttttcatttcttttaactaccatgcccttgatatatcttttgcacctgctgaacttcatttctgtatcacctgacctctggatgccaaaacgtttattctgctttgtctgttgtagaattttagataaagctattaatggcaatatttttttgctaaacgtttttgttttttactgtcactagggcaataaaatttatactcaaccatataataacattttttaactactaaaggagtagtttttattttaaagtcttagcaatttctattacaacttttcttagacttaacacttatgataaatgactaacatagtaacagaatctttatgaaatatgaccttttctgaaaatacatacttttacatttctactttattgagacctattagatgtaagtgctagtagaatataagataaaagaggctgagaattaccatacaagggtattacaactgtaaaacaatttatctttgtttcattgttctgtcaataattgttaccaaagagataaaaataaaagcagaatgtatatcatcccatctgaaaaacactaattattgacatgtgcatctgtacaataaacttaaaatgattattaaataatcaaatatatctactacattgtttatattattgaataaagtatattttccaaatgtaaaaaaaaaaaaa

SEQ ID NO: 101 - DNA, 2700 bp, Homo sapiens
agtctacagactcctccgaacacagagctgcagctcttcagggaagaaatcaaaacaagatcacaagaatactgaaaaatgaagcctaaaatgaagtattcaaccaacaaaatttccacagcaaagtggaagaacacagcaagcaaagccttgtgtttcaagctgggaaaatcccaacagaaggccaaagaagtttgccccatgtactttatgaagctccgctctggccttatgataaaaaaggaggcctgttactttaggagagaaaccaccaaaaggccttcactgaaaacaggtagaaagcacaaaagacatctggtactcgctgcctgtcaacagcagtctactgtggagtgctttgcctttggtatatcaggggtccagaaatatactagagcacttcatgattcaagtatcacagagtatcttgcttctctaagcacatacaatgatcaatccattacttttgctttggaggatgaaagttatgagatatatgttgaagacttgaaaaaagatgaaaagaaagataaggtgttactgagttactatgagtctcaacacccctcaaatgaatcaggtgacggtgttgatggtaagatgttaatggtaaccctgagtcctacaaaagacttctggttgcatgccaacaacaaggaacactctgtggagctccataagtgtgaaaaaccactgccagaccaggccttctttgtccttcataatatgcactccaactgtgtttcatttgaatgcaagactgatcctggagtgtttataggtgtaaaggataatcatcttgctctgattaaagtagactcttctgagaatttgtgtactgaaaatatcttgtttaagctctctgaaacttagttgatggaaacctgtgagtcttgggttgagtacccaaatgctaccactggagaaggaatgagagataaagaaagagacaggtgacatctaagggaaatgaagagtgcttagcatgtgtggaatgttttccatattatgtataaaaatattttttctaatcctccagttattcttttatttccctctgtataactgcatcttcaatacaagtatcagtatattaaatagggtattggtaaagaaacggtcaacattctaaagagatacagtctgacctttacttttctctagtttcagtccagaaagaacttcatatttagagctaaggccactgaggaaagagccatagcttaagtctctatgtagacagggatccattttaaagagctacttagagaaataattttccacagttccaaacgataggctcaaacactagagctgctagtaaaaagaagaccagatgcttcacagaattatcattttttcaactggaataaaacaccaggtttgtttgtagatgtcttaggcaacactcagagcagatctcccttactgtcaggggatatggaacttcaaaggcccacatggcaagccaggtaacataaatgtgtgaaaaagtaaagataactaaaaaatttagaaaaataaatccagtatttgtaaagtgaataacttcatttctaattgtttaatttttaaaattctgatttttatatattgagtttaagcaaggcattcttacacgaggaagtgaagtaaattttagttcagacataaaatttcacttattaggaatatgtaacatgctaaaacttttttttttttaaagagtactgagtcacaacatgttttagagcatccaagtaccatataatccaactatcatggtaaggccagaaatcttctaacctaccagagcctagatgagacaccgaattaacattaaaatttcagtaactgactgtccctcatgtccatggcctaccatcccttctgaccctggcttccagggacctatgtcttttaatactcactgtcacattgggcaaagttgcttctaatccttatttcccatgtgcacaagtctttttgtattccagcttcctgataacactgcttactgtggaatattcatttgacatctgtctcttttcatttcttttaactaccatgcccttgatatatcttttgcacctgctgaacttcatttctgtatcacctgacctctggatgccaaaacgtttattctgctttgtctgttgtagaattttagataaagctattaatggcaatatttttttgctaaacgtttttgttttttactgtcactagggcaataaaatttatactcaaccatataataacattttttaactactaaaggagtagtttttattttaaagtcttagcaatttctattacaacttttcttagacttaacacttatgataaatgactaacatagtaacagaatctttatgaaatatgaccttttctgaaaatacatacttttacatttctactttattgagacctattagatgtaagtgctagtagaatataagataaaagaggctgagaattaccatacaagggtattacaactgtaaaacaatttatctttgtttcattgttctgtcaataattgttaccaaagagataaaaataaaagcagaatgtatatcatcccatctgaaaaacactaattattgacatgtgcatctgtacaataaacttaaaatgattattaaataatcaaatatatctactacattgtttatattattgaataaagtatattttccaaatgtaaaaaaaaaaaaa

SEQ ID NO: 102 - DNA, 2687 bp, Homo sapiens
acagatgccaaacgagatggagagagggtgagtaggagcaaaatttctcatgagaatactgaaaaatgaagcctaaaatgaagtattcaaccaacaaaatttccacagcaaagtggaagaacacagcaagcaaagccttgtgtttcaagctgggaaaatcccaacagaaggccaaagaagtttgccccatgtactttatgaagctccgctctggccttatgataaaaaaggaggcctgttactttaggagagaaaccaccaaaaggccttcactgaaaacaggtagaaagcacaaaagacatctggtactcgctgcctgtcaacagcagtctactgtggagtgctttgcctttggtatatcaggggtccagaaatatactagagcacttcatgattcaagtatcacagagtatcttgcttctctaagcacatacaatgatcaatccattacttttgctttggaggatgaaagttatgagatatatgttgaagacttgaaaaaagatgaaaagaaagataaggtgttactgagttactatgagtctcaacacccctcaaatgaatcaggtgacggtgttgatggtaagatgttaatggtaaccctgagtcctacaaaagacttctggttgcatgccaacaacaaggaacactctgtggagctccataagtgtgaaaaaccactgccagaccaggccttctttgtccttcataatatgcactccaactgtgtttcatttgaatgcaagactgatcctggagtgtttataggtgtaaaggataatcatcttgctctgattaaagtagactcttctgagaatttgtgtactgaaaatatcttgtttaagctctctgaaacttagttgatggaaacctgtgagtcttgggttgagtacccaaatgctaccactggagaaggaatgagagataaagaaagagacaggtgacatctaagggaaatgaagagtgcttagcatgtgtggaatgttttccatattatgtataaaaatattttttctaatcctccagttattcttttatttccctctgtataactgcatcttcaatacaagtatcagtatattaaatagggtattggtaaagaaacggtcaacattctaaagagatacagtctgacctttacttttctctagtttcagtccagaaagaacttcatatttagagctaaggccactgaggaaagagccatagcttaagtctctatgtagacagggatccattttaaagagctacttagagaaataattttccacagttccaaacgataggctcaaacactagagctgctagtaaaaagaagaccagatgcttcacagaattatcattttttcaactggaataaaacaccaggtttgtttgtagatgtcttaggcaacactcagagcagatctcccttactgtcaggggatatggaacttcaaaggcccacatggcaagccaggtaacataaatgtgtgaaaaagtaaagataactaaaaaatttagaaaaataaatccagtatttgtaaagtgaataacttcatttctaattgtttaatttttaaaattctgatttttatatattgagtttaagcaaggcattcttacacgaggaagtgaagtaaattttagttcagacataaaatttcacttattaggaatatgtaacatgctaaaacttttttttttttaaagagtactgagtcacaacatgttttagagcatccaagtaccatataatccaactatcatggtaaggccagaaatcttctaacctaccagagcctagatgagacaccgaattaacattaaaatttcagtaactgactgtccctcatgtccatggcctaccatcccttctgaccctggcttccagggacctatgtcttttaatactcactgtcacattgggcaaagttgcttctaatccttatttcccatgtgcacaagtctttttgtattccagcttcctgataacactgcttactgtggaatattcatttgacatctgtctcttttcatttcttttaactaccatgcccttgatatatcttttgcacctgctgaacttcatttctgtatcacctgacctctggatgccaaaacgtttattctgctttgtctgttgtagaattttagataaagctattaatggcaatatttttttgctaaacgtttttgttttttactgtcactagggcaataaaatttatactcaaccatataataacattttttaactactaaaggagtagtttttattttaaagtcttagcaatttctattacaacttttcttagacttaacacttatgataaatgactaacatagtaacagaatctttatgaaatatgaccttttctgaaaatacatacttttacatttctactttattgagacctattagatgtaagtgctagtagaatataagataaaagaggctgagaattaccatacaagggtattacaactgtaaaacaatttatctttgtttcattgttctgtcaataattgttaccaaagagataaaaataaaagcagaatgtatatcatcccatctgaaaaacactaattattgacatgtgcatctgtacaataaacttaaaatgattattaaataatcaaatatatctactacattgtttatattattgaataaagtatattttccaaatgtaaaaaaaaaaaaa

SEQ ID NO: 103 - DNA, 2592 bp, Homo sapiens
agtctacagactcctccgaacacagagctgcagctcttcagggaagaaatcaaaacaagatcacaagaatactgaaaaatgaagcctaaaatgaagtattcaaccaacaaaatttccacagcaaagtggaagaacacagcaagcaaagccttgtgtttcaagctgggaaaatcccaacagaaggccaaagaagtttgccccatgtactttatgaagctccgctctggccttatgataaaaaaggaggcctgttactttaggagagaaaccaccaaaaggccttcactgaaaacaggaatttcacctattacagagtatcttgcttctctaagcacatacaatgatcaatccattacttttgctttggaggatgaaagttatgagatatatgttgaagacttgaaaaaagatgaaaagaaagataaggtgttactgagttactatgagtctcaacacccctcaaatgaatcaggtgacggtgttgatggtaagatgttaatggtaaccctgagtcctacaaaagacttctggttgcatgccaacaacaaggaacactctgtggagctccataagtgtgaaaaaccactgccagaccaggccttctttgtccttcataatatgcactccaactgtgtttcatttgaatgcaagactgatcctggagtgtttataggtgtaaaggataatcatcttgctctgattaaagtagactcttctgagaatttgtgtactgaaaatatcttgtttaagctctctgaaacttagttgatggaaacctgtgagtcttgggttgagtacccaaatgctaccactggagaaggaatgagagataaagaaagagacaggtgacatctaagggaaatgaagagtgcttagcatgtgtggaatgttttccatattatgtataaaaatattttttctaatcctccagttattcttttatttccctctgtataactgcatcttcaatacaagtatcagtatattaaatagggtattggtaaagaaacggtcaacattctaaagagatacagtctgacctttacttttctctagtttcagtccagaaagaacttcatatttagagctaaggccactgaggaaagagccatagcttaagtctctatgtagacagggatccattttaaagagctacttagagaaataattttccacagttccaaacgataggctcaaacactagagctgctagtaaaaagaagaccagatgcttcacagaattatcattttttcaactggaataaaacaccaggtttgtttgtagatgtcttaggcaacactcagagcagatctcccttactgtcaggggatatggaacttcaaaggcccacatggcaagccaggtaacataaatgtgtgaaaaagtaaagataactaaaaaatttagaaaaataaatccagtatttgtaaagtgaataacttcatttctaattgtttaatttttaaaattctgatttttatatattgagtttaagcaaggcattcttacacgaggaagtgaagtaaattttagttcagacataaaatttcacttattaggaatatgtaacatgctaaaacttttttttttttaaagagtactgagtcacaacatgttttagagcatccaagtaccatataatccaactatcatggtaaggccagaaatcttctaacctaccagagcctagatgagacaccgaattaacattaaaatttcagtaactgactgtccctcatgtccatggcctaccatcccttctgaccctggcttccagggacctatgtcttttaatactcactgtcacattgggcaaagttgcttctaatccttatttcccatgtgcacaagtctttttgtattccagcttcctgataacactgcttactgtggaatattcatttgacatctgtctcttttcatttcttttaactaccatgcccttgatatatcttttgcacctgctgaacttcatttctgtatcacctgacctctggatgccaaaacgtttattctgctttgtctgttgtagaattttagataaagctattaatggcaatatttttttgctaaacgtttttgttttttactgtcactagggcaataaaatttatactcaaccatataataacattttttaactactaaaggagtagtttttattttaaagtcttagcaatttctattacaacttttcttagacttaacacttatgataaatgactaacatagtaacagaatctttatgaaatatgaccttttctgaaaatacatacttttacatttctactttattgagacctattagatgtaagtgctagtagaatataagataaaagaggctgagaattaccatacaagggtattacaactgtaaaacaatttatctttgtttcattgttctgtcaataattgttaccaaagagataaaaataaaagcagaatgtatatcatcccatctgaaaaacactaattattgacatgtgcatctgtacaataaacttaaaatgattattaaataatcaaatatatctactacattgtttatattattgaataaagtatattttccaaatgtaaaaaaaaaaaaa

SEQ ID NO: 104 - DNA, 5170 bp, Homo sapiens
gtggccggcggccggagccgactcggagcgcgcggcgccggccgggaggagccggagagcggccgggccgggcggtgggggcgccggcctgccccgcgcgccccagggagcggcaggaatgtgacaatcgcgcgcccgcgcaccgaagcactcctcgctcggctcctagggctctcgcccctctgagctgagccgggttccgcccggggctgggatcccatcaccctccacggccgtccgtccaggtagacgcaccctctgaagatggtgactccctcctgagaagctggaccccttggtaaaagacaaggccttctccaagaagaatatgaaagtgttactcagacttatttgtttcatagctctactgatttcttctctggaggctgataaatgcaaggaacgtgaagaaaaaataattttagtgtcatctgcaaatgaaattgatgttcgtccctgtcctcttaacccaaatgaacacaaaggcactataacttggtataaagatgacagcaagacacctgtatctacagaacaagcctccaggattcatcaacacaaagagaaactttggtttgttcctgctaaggtggaggattcaggacattactattgcgtggtaagaaattcatcttactgcctcagaattaaaataagtgcaaaatttgtggagaatgagcctaacttatgttataatgcacaagccatatttaagcagaaactacccgttgcaggagacggaggacttgtgtgcccttatatggagttttttaaaaatgaaaataatgagttacctaaattacagtggtataaggattgcaaacctctacttcttgacaatatacactttagtggagtcaaagataggctcatcgtgatgaatgtggctgaaaagcatagagggaactatacttgtcatgcatcctacacatacttgggcaagcaatatcctattacccgggtaatagaatttattactctagaggaaaacaaacccacaaggcctgtgattgtgagcccagctaatgagacaatggaagtagacttgggatcccagatacaattgatctgtaatgtcaccggccagttgagtgacattgcttactggaagtggaatgggtcagtaattgatgaagatgacccagtgctaggggaagactattacagtgtggaaaatcctgcaaacaaaagaaggagtaccctcatcacagtgcttaatatatcggaaattgaaagtagattttataaacatccatttacctgttttgccaagaatacacatggtatagatgcagcatatatccagttaatatatccagtcactaatttccagaagcacatgattggtatatgtgtcacgttgacagtcataattgtgtgttctgttttcatctataaaatcttcaagattgacattgtgctttggtacagggattcctgctatgattttctcccaataaaagcttcagatggaaagacctatgacgcatatatactgtatccaaagactgttggggaagggtctacctctgactgtgatatttttgtgtttaaagtcttgcctgaggtcttggaaaaacagtgtggatataagctgttcatttatggaagggatgactacgttggggaagacattgttgaggtcattaatgaaaacgtaaagaaaagcagaagactgattatcattttagtcagagaaacatcaggcttcagctggctgggtggttcatctgaagagcaaatagccatgtataatgctcttgttcaggatggaattaaagttgtcctgcttgagctggagaaaatccaagactatgagaaaatgccagaatcgattaaattcattaagcagaaacatggggctatccgctggtcaggggactttacacagggaccacagtctgcaaagacaaggttctggaagaatgtcaggtaccacatgccagtccagcgacggtcaccttcatctaaacaccagttactgtcaccagccactaaggagaaactgcaaagagaggctcacgtgcctctcgggtagcatggagaagttgccaagagttctttaggtgcctcctgtcttatggcgttgcaggccaggttatgcctcatgctgacttgcagagttcatggaatgtaactatatcatcctttatccctgaggtcacctggaatcagattattaagggaataagccatgacgtcaatagcagcccagggcacttcagagtagagggcttgggaagatcttttaaaaaggcagtaggcccggtgtggtggctcacgcctataatcccagcactttgggaggctgaagtgggtggatcaccagaggtcaggagttcgagaccagcccagccaacatggcaaaaccccatctctactaaaaatacaaaaatgagctaggcatggtggcacacgcctgtaatcccagctacacctgaggctgaggcaggagaattgcttgaaccggggagacggaggttgcagtgagccgagtttgggccactgcactctagcctggcaacagagcaagactccgtctcaaaaaaagggcaataaatgccctctctgaatgtttgaactgccaagaaaaggcatggagacagcgaactagaagaaagggcaagaaggaaatagccaccgtctacagatggcttagttaagtcatccacagcccaagggcggggctatgccttgtctggggaccctgtagagtcactgaccctggagcggctctcctgagaggtgctgcaggcaaagtgagactgacacctcactgaggaagggagacatattcttggagaactttccatctgcttgtattttccatacacatccccagccagaagttagtgtccgaagaccgaattttattttacagagcttgaaaactcacttcaatgaacaaagggattctccaggattccaaagttttgaagtcatcttagctttccacaggagggagagaacttaaaaaagcaacagtagcagggaattgatccacttcttaatgctttcctccctggcatgaccatcctgtcctttgttattatcctgcattttacgtctttggaggaacagctccctagtggcttcctccgtctgcaatgtcccttgcacagcccacacatgaaccatccttcccatgatgccgctcttctgtcatcccgctcctgctgaaacacctcccaggggctccacctgttcaggagctgaagcccatgctttcccaccagcatgtcactcccagaccacctccctgccctgtcctccagcttcccctcgctgtcctgctgtgtgaattcccaggttggcctggtggccatgtcgcctgcccccagcactcctctgtctctgctcttgcctgcacccttcctcctcctttgcctaggaggccttctcgcattttctctagctgatcagaattttaccaaaattcagaacatcctccaattccacagtctctgggagactttccctaagaggcgacttcctctccagccttctctctctggtcaggcccactgcagagatggtggtgagcacatctgggaggctggtctccctccagctggaattgctgctctctgagggagaggctgtggtggctgtctctgtccctcactgccttccaggagcaatttgcacatgtaacatagatttatgtaatgctttatgtttaaaaacattccccaattatcttatttaatttttgcaattattctaattttatatatagagaaagtgacctattttttaaaaaaatcacactctaagttctattgaacctaggacttgagcctccatttctggcttctagtctggtgttctgagtacttgatttcaggtcaataacggtcccccctcactccacactggcacgtttgtgagaagaaatgacattttgctaggaagtgaccgagtctaggaatgcttttattcaagacaccaaattccaaacttctaaatgttggaattttcaaaaattgtgtttagattttatgaaaaactcttctactttcatctattctttccctagaggcaaacatttcttaaaatgtttcattttcattaaaaatgaaagccaaatttatatgccaccgattgcaggacacaagcacagttttaagagttgtatgaacatggagaggacttttggtttttatatttctcgtatttaatatgggtgaacaccaacttttatttggaataataattttcctcctaaacaaaaacacattgagtttaagtctctgactcttgcctttccacctgctttctcctgggcccgctttgcctgcttgaaggaacagtgctgttctggagctgctgttccaacagacagggcctagctttcatttgacacacagactacagccagaagcccatggagcagggatgtcacgtcttgaaaagcctattagatgttttacaaatttaattttgcagattattttagtctgtcatccagaaaatgtgtcagcatgcatagtgctaagaaagcaagccaatttggaaacttaggttagtgacaaaattggccagagagtgggggtgatgatgaccaagaattacaagtagaatggcagctggaatttaaggagggacaagaatcaatggataagcgtgggtggaggaagatccaaacagaaaagtgcaaagttattccccatcttccaagggttgaattctggaggaagaagacacattcctagttccccgtgaacttcctttgacttattgtccccactaaaacaaaacaaaaaacttttaatgccttccacattaattagattttcttgcagtttttttatggcatttttttaaagatgccctaagtgttgaagaagagtttgcaaatgcaacaaaatatttaattaccggttgttaaaactggtttagcacaatttatattttccctctcttgcctttcttatttgcaataaaaggtattgagccattttttaaatgacatttttgataaattatgtttgtactagttgatgaaggagttttttttaacctgtttatataattttgcagcagaagccaaattttttgtatattaaagcaccaaattcatgtacagcatgcatcacggatcaatagactgtacttattttccaataaaattttcaaactttgtactgttaaaaaaaaaaaaaaaaaa

SEQ ID NO: 105 - DNA, 4990 bp, Homo sapiens
attggcagctcttcacttgtatcttttcatatcaaaaatgggaggtgacacccagtttaaggaaaattccaaggcatttgtctcgactaatgtgaaagatgattacagtggccagaggactgccaaggctccttctcaagctgcttgagtcaatgagggtagacgcaccctctgaagatggtgactccctcctgagaagctggaccccttggtaaaagacaaggccttctccaagaagaatatgaaagtgttactcagacttatttgtttcatagctctactgatttcttctctggaggctgataaatgcaaggaacgtgaagaaaaaataattttagtgtcatctgcaaatgaaattgatgttcgtccctgtcctcttaacccaaatgaacacaaaggcactataacttggtataaagatgacagcaagacacctgtatctacagaacaagcctccaggattcatcaacacaaagagaaactttggtttgttcctgctaaggtggaggattcaggacattactattgcgtggtaagaaattcatcttactgcctcagaattaaaataagtgcaaaatttgtggagaatgagcctaacttatgttataatgcacaagccatatttaagcagaaactacccgttgcaggagacggaggacttgtgtgcccttatatggagttttttaaaaatgaaaataatgagttacctaaattacagtggtataaggattgcaaacctctacttcttgacaatatacactttagtggagtcaaagataggctcatcgtgatgaatgtggctgaaaagcatagagggaactatacttgtcatgcatcctacacatacttgggcaagcaatatcctattacccgggtaatagaatttattactctagaggaaaacaaacccacaaggcctgtgattgtgagcccagctaatgagacaatggaagtagacttgggatcccagatacaattgatctgtaatgtcaccggccagttgagtgacattgcttactggaagtggaatgggtcagtaattgatgaagatgacccagtgctaggggaagactattacagtgtggaaaatcctgcaaacaaaagaaggagtaccctcatcacagtgcttaatatatcggaaattgaaagtagattttataaacatccatttacctgttttgccaagaatacacatggtatagatgcagcatatatccagttaatatatccagtcactaatttccagaagcacatgattggtatatgtgtcacgttgacagtcataattgtgtgttctgttttcatctataaaatcttcaagattgacattgtgctttggtacagggattcctgctatgattttctcccaataaaagtcttgcctgaggtcttggaaaaacagtgtggatataagctgttcatttatggaagggatgactacgttggggaagacattgttgaggtcattaatgaaaacgtaaagaaaagcagaagactgattatcattttagtcagagaaacatcaggcttcagctggctgggtggttcatctgaagagcaaatagccatgtataatgctcttgttcaggatggaattaaagttgtcctgcttgagctggagaaaatccaagactatgagaaaatgccagaatcgattaaattcattaagcagaaacatggggctatccgctggtcaggggactttacacagggaccacagtctgcaaagacaaggttctggaagaatgtcaggtaccacatgccagtccagcgacggtcaccttcatctaaacaccagttactgtcaccagccactaaggagaaactgcaaagagaggctcacgtgcctctcgggtagcatggagaagttgccaagagttctttaggtgcctcctgtcttatggcgttgcaggccaggttatgcctcatgctgacttgcagagttcatggaatgtaactatatcatcctttatccctgaggtcacctggaatcagattattaagggaataagccatgacgtcaatagcagcccagggcacttcagagtagagggcttgggaagatcttttaaaaaggcagtaggcccggtgtggtggctcacgcctataatcccagcactttgggaggctgaagtgggtggatcaccagaggtcaggagttcgagaccagcccagccaacatggcaaaaccccatctctactaaaaatacaaaaatgagctaggcatggtggcacacgcctgtaatcccagctacacctgaggctgaggcaggagaattgcttgaaccggggagacggaggttgcagtgagccgagtttgggccactgcactctagcctggcaacagagcaagactccgtctcaaaaaaagggcaataaatgccctctctgaatgtttgaactgccaagaaaaggcatggagacagcgaactagaagaaagggcaagaaggaaatagccaccgtctacagatggcttagttaagtcatccacagcccaagggcggggctatgccttgtctggggaccctgtagagtcactgaccctggagcggctctcctgagaggtgctgcaggcaaagtgagactgacacctcactgaggaagggagacatattcttggagaactttccatctgcttgtattttccatacacatccccagccagaagttagtgtccgaagaccgaattttattttacagagcttgaaaactcacttcaatgaacaaagggattctccaggattccaaagttttgaagtcatcttagctttccacaggagggagagaacttaaaaaagcaacagtagcagggaattgatccacttcttaatgctttcctccctggcatgaccatcctgtcctttgttattatcctgcattttacgtctttggaggaacagctccctagtggcttcctccgtctgcaatgtcccttgcacagcccacacatgaaccatccttcccatgatgccgctcttctgtcatcccgctcctgctgaaacacctcccaggggctccacctgttcaggagctgaagcccatgctttcccaccagcatgtcactcccagaccacctccctgccctgtcctccagcttcccctcgctgtcctgctgtgtgaattcccaggttggcctggtggccatgtcgcctgcccccagcactcctctgtctctgctcttgcctgcacccttcctcctcctttgcctaggaggccttctcgcattttctctagctgatcagaattttaccaaaattcagaacatcctccaattccacagtctctgggagactttccctaagaggcgacttcctctccagccttctctctctggtcaggcccactgcagagatggtggtgagcacatctgggaggctggtctccctccagctggaattgctgctctctgagggagaggctgtggtggctgtctctgtccctcactgccttccaggagcaatttgcacatgtaacatagatttatgtaatgctttatgtttaaaaacattccccaattatcttatttaatttttgcaattattctaattttatatatagagaaagtgacctattttttaaaaaaatcacactctaagttctattgaacctaggacttgagcctccatttctggcttctagtctggtgttctgagtacttgatttcaggtcaataacggtcccccctcactccacactggcacgtttgtgagaagaaatgacattttgctaggaagtgaccgagtctaggaatgcttttattcaagacaccaaattccaaacttctaaatgttggaattttcaaaaattgtgtttagattttatgaaaaactcttctactttcatctattctttccctagaggcaaacatttcttaaaatgtttcattttcattaaaaatgaaagccaaatttatatgccaccgattgcaggacacaagcacagttttaagagttgtatgaacatggagaggacttttggtttttatatttctcgtatttaatatgggtgaacaccaacttttatttggaataataattttcctcctaaacaaaaacacattgagtttaagtctctgactcttgcctttccacctgctttctcctgggcccgctttgcctgcttgaaggaacagtgctgttctggagctgctgttccaacagacagggcctagctttcatttgacacacagactacagccagaagcccatggagcagggatgtcacgtcttgaaaagcctattagatgttttacaaatttaattttgcagattattttagtctgtcatccagaaaatgtgtcagcatgcatagtgctaagaaagcaagccaatttggaaacttaggttagtgacaaaattggccagagagtgggggtgatgatgaccaagaattacaagtagaatggcagctggaatttaaggagggacaagaatcaatggataagcgtgggtggaggaagatccaaacagaaaagtgcaaagttattccccatcttccaagggttgaattctggaggaagaagacacattcctagttccccgtgaacttcctttgacttattgtccccactaaaacaaaacaaaaaacttttaatgccttccacattaattagattttcttgcagtttttttatggcatttttttaaagatgccctaagtgttgaagaagagtttgcaaatgcaacaaaatatttaattaccggttgttaaaactggtttagcacaatttatattttccctctcttgcctttcttatttgcaataaaaggtattgagccattttttaaatgacatttttgataaattatgtttgtactagttgatgaaggagttttttttaacctgtttatataattttgcagcagaagccaaattttttgtatattaaagcaccaaattcatgtacagcatgcatcacggatcaatagactgtacttattttccaataaaattttcaaactttgtactgttaaaaaaaaaaaaaaaaaa

SEQ ID NO: 106 - DNA, 5083 bp, Homo sapiens
attggcagctcttcacttgtatcttttcatatcaaaaatgggaggtgacacccagtttaaggaaaattccaaggcatttgtctcgactaatgtgaaagatgattacagtggccagaggactgccaaggctccttctcaagctgcttgagtcaatgagggtagacgcaccctctgaagatggtgactccctcctgagaagctggaccccttggtaaaagacaaggccttctccaagaagaatatgaaagtgttactcagacttatttgtttcatagctctactgatttcttctctggaggctgataaatgcaaggaacgtgaagaaaaaataattttagtgtcatctgcaaatgaaattgatgttcgtccctgtcctcttaacccaaatgaacacaaaggcactataacttggtataaagatgacagcaagacacctgtatctacagaacaagcctccaggattcatcaacacaaagagaaactttggtttgttcctgctaaggtggaggattcaggacattactattgcgtggtaagaaattcatcttactgcctcagaattaaaataagtgcaaaatttgtggagaatgagcctaacttatgttataatgcacaagccatatttaagcagaaactacccgttgcaggagacggaggacttgtgtgcccttatatggagttttttaaaaatgaaaataatgagttacctaaattacagtggtataaggattgcaaacctctacttcttgacaatatacactttagtggagtcaaagataggctcatcgtgatgaatgtggctgaaaagcatagagggaactatacttgtcatgcatcctacacatacttgggcaagcaatatcctattacccgggtaatagaatttattactctagaggaaaacaaacccacaaggcctgtgattgtgagcccagctaatgagacaatggaagtagacttgggatcccagatacaattgatctgtaatgtcaccggccagttgagtgacattgcttactggaagtggaatgggtcagtaattgatgaagatgacccagtgctaggggaagactattacagtgtggaaaatcctgcaaacaaaagaaggagtaccctcatcacagtgcttaatatatcggaaattgaaagtagattttataaacatccatttacctgttttgccaagaatacacatggtatagatgcagcatatatccagttaatatatccagtcactaatttccagaagcacatgattggtatatgtgtcacgttgacagtcataattgtgtgttctgttttcatctataaaatcttcaagattgacattgtgctttggtacagggattcctgctatgattttctcccaataaaagcttcagatggaaagacctatgacgcatatatactgtatccaaagactgttggggaagggtctacctctgactgtgatatttttgtgtttaaagtcttgcctgaggtcttggaaaaacagtgtggatataagctgttcatttatggaagggatgactacgttggggaagacattgttgaggtcattaatgaaaacgtaaagaaaagcagaagactgattatcattttagtcagagaaacatcaggcttcagctggctgggtggttcatctgaagagcaaatagccatgtataatgctcttgttcaggatggaattaaagttgtcctgcttgagctggagaaaatccaagactatgagaaaatgccagaatcgattaaattcattaagcagaaacatggggctatccgctggtcaggggactttacacagggaccacagtctgcaaagacaaggttctggaagaatgtcaggtaccacatgccagtccagcgacggtcaccttcatctaaacaccagttactgtcaccagccactaaggagaaactgcaaagagaggctcacgtgcctctcgggtagcatggagaagttgccaagagttctttaggtgcctcctgtcttatggcgttgcaggccaggttatgcctcatgctgacttgcagagttcatggaatgtaactatatcatcctttatccctgaggtcacctggaatcagattattaagggaataagccatgacgtcaatagcagcccagggcacttcagagtagagggcttgggaagatcttttaaaaaggcagtaggcccggtgtggtggctcacgcctataatcccagcactttgggaggctgaagtgggtggatcaccagaggtcaggagttcgagaccagcccagccaacatggcaaaaccccatctctactaaaaatacaaaaatgagctaggcatggtggcacacgcctgtaatcccagctacacctgaggctgaggcaggagaattgcttgaaccggggagacggaggttgcagtgagccgagtttgggccactgcactctagcctggcaacagagcaagactccgtctcaaaaaaagggcaataaatgccctctctgaatgtttgaactgccaagaaaaggcatggagacagcgaactagaagaaagggcaagaaggaaatagccaccgtctacagatggcttagttaagtcatccacagcccaagggcggggctatgccttgtctggggaccctgtagagtcactgaccctggagcggctctcctgagaggtgctgcaggcaaagtgagactgacacctcactgaggaagggagacatattcttggagaactttccatctgcttgtattttccatacacatccccagccagaagttagtgtccgaagaccgaattttattttacagagcttgaaaactcacttcaatgaacaaagggattctccaggattccaaagttttgaagtcatcttagctttccacaggagggagagaacttaaaaaagcaacagtagcagggaattgatccacttcttaatgctttcctccctggcatgaccatcctgtcctttgttattatcctgcattttacgtctttggaggaacagctccctagtggcttcctccgtctgcaatgtcccttgcacagcccacacatgaaccatccttcccatgatgccgctcttctgtcatcccgctcctgctgaaacacctcccaggggctccacctgttcaggagctgaagcccatgctttcccaccagcatgtcactcccagaccacctccctgccctgtcctccagcttcccctcgctgtcctgctgtgtgaattcccaggttggcctggtggccatgtcgcctgcccccagcactcctctgtctctgctcttgcctgcacccttcctcctcctttgcctaggaggccttctcgcattttctctagctgatcagaattttaccaaaattcagaacatcctccaattccacagtctctgggagactttccctaagaggcgacttcctctccagccttctctctctggtcaggcccactgcagagatggtggtgagcacatctgggaggctggtctccctccagctggaattgctgctctctgagggagaggctgtggtggctgtctctgtccctcactgccttccaggagcaatttgcacatgtaacatagatttatgtaatgctttatgtttaaaaacattccccaattatcttatttaatttttgcaattattctaattttatatatagagaaagtgacctattttttaaaaaaatcacactctaagttctattgaacctaggacttgagcctccatttctggcttctagtctggtgttctgagtacttgatttcaggtcaataacggtcccccctcactccacactggcacgtttgtgagaagaaatgacattttgctaggaagtgaccgagtctaggaatgcttttattcaagacaccaaattccaaacttctaaatgttggaattttcaaaaattgtgtttagattttatgaaaaactcttctactttcatctattctttccctagaggcaaacatttcttaaaatgtttcattttcattaaaaatgaaagccaaatttatatgccaccgattgcaggacacaagcacagttttaagagttgtatgaacatggagaggacttttggtttttatatttctcgtatttaatatgggtgaacaccaacttttatttggaataataattttcctcctaaacaaaaacacattgagtttaagtctctgactcttgcctttccacctgctttctcctgggcccgctttgcctgcttgaaggaacagtgctgttctggagctgctgttccaacagacagggcctagctttcatttgacacacagactacagccagaagcccatggagcagggatgtcacgtcttgaaaagcctattagatgttttacaaatttaattttgcagattattttagtctgtcatccagaaaatgtgtcagcatgcatagtgctaagaaagcaagccaatttggaaacttaggttagtgacaaaattggccagagagtgggggtgatgatgaccaagaattacaagtagaatggcagctggaatttaaggagggacaagaatcaatggataagcgtgggtggaggaagatccaaacagaaaagtgcaaagttattccccatcttccaagggttgaattctggaggaagaagacacattcctagttccccgtgaacttcctttgacttattgtccccactaaaacaaaacaaaaaacttttaatgccttccacattaattagattttcttgcagtttttttatggcatttttttaaagatgccctaagtgttgaagaagagtttgcaaatgcaacaaaatatttaattaccggttgttaaaactggtttagcacaatttatattttccctctcttgcctttcttatttgcaataaaaggtattgagccattttttaaatgacatttttgataaattatgtttgtactagttgatgaaggagttttttttaacctgtttatataattttgcagcagaagccaaattttttgtatattaaagcaccaaattcatgtacagcatgcatcacggatcaatagactgtacttattttccaataaaattttcaaactttgtactgttaaaaaaaaaaaaaaaaaa

SEQ ID NO: 107 - DNA, 5224 bp, Homo sapiens
attaaagccctaagaggctgtgacacagccatctccaaaaccccactttctccttcctttgagcctccgtaccagctggggcgtccggcaagatgtgagttgtcactctgctgcggcacagacctgaattaacaactctagctagggctgacttcaaaaagcactttcgttttttaataaccaacatcagctcagcaggcttcatttgggaaaagaaaccttgtcggattaccccgacattctccacctcctgggaggccagccattcccaaatgccccaaggatgaagaacggagacggtagacgcaccctctgaagatggtgactccctcctgagaagctggaccccttggtaaaagacaaggccttctccaagaagaatatgaaagtgttactcagacttatttgtttcatagctctactgatttcttctctggaggctgataaatgcaaggaacgtgaagaaaaaataattttagtgtcatctgcaaatgaaattgatgttcgtccctgtcctcttaacccaaatgaacacaaaggcactataacttggtataaagatgacagcaagacacctgtatctacagaacaagcctccaggattcatcaacacaaagagaaactttggtttgttcctgctaaggtggaggattcaggacattactattgcgtggtaagaaattcatcttactgcctcagaattaaaataagtgcaaaatttgtggagaatgagcctaacttatgttataatgcacaagccatatttaagcagaaactacccgttgcaggagacggaggacttgtgtgcccttatatggagttttttaaaaatgaaaataatgagttacctaaattacagtggtataaggattgcaaacctctacttcttgacaatatacactttagtggagtcaaagataggctcatcgtgatgaatgtggctgaaaagcatagagggaactatacttgtcatgcatcctacacatacttgggcaagcaatatcctattacccgggtaatagaatttattactctagaggaaaacaaacccacaaggcctgtgattgtgagcccagctaatgagacaatggaagtagacttgggatcccagatacaattgatctgtaatgtcaccggccagttgagtgacattgcttactggaagtggaatgggtcagtaattgatgaagatgacccagtgctaggggaagactattacagtgtggaaaatcctgcaaacaaaagaaggagtaccctcatcacagtgcttaatatatcggaaattgaaagtagattttataaacatccatttacctgttttgccaagaatacacatggtatagatgcagcatatatccagttaatatatccagtcactaatttccagaagcacatgattggtatatgtgtcacgttgacagtcataattgtgtgttctgttttcatctataaaatcttcaagattgacattgtgctttggtacagggattcctgctatgattttctcccaataaaagcttcagatggaaagacctatgacgcatatatactgtatccaaagactgttggggaagggtctacctctgactgtgatatttttgtgtttaaagtcttgcctgaggtcttggaaaaacagtgtggatataagctgttcatttatggaagggatgactacgttggggaagacattgttgaggtcattaatgaaaacgtaaagaaaagcagaagactgattatcattttagtcagagaaacatcaggcttcagctggctgggtggttcatctgaagagcaaatagccatgtataatgctcttgttcaggatggaattaaagttgtcctgcttgagctggagaaaatccaagactatgagaaaatgccagaatcgattaaattcattaagcagaaacatggggctatccgctggtcaggggactttacacagggaccacagtctgcaaagacaaggttctggaagaatgtcaggtaccacatgccagtccagcgacggtcaccttcatctaaacaccagttactgtcaccagccactaaggagaaactgcaaagagaggctcacgtgcctctcgggtagcatggagaagttgccaagagttctttaggtgcctcctgtcttatggcgttgcaggccaggttatgcctcatgctgacttgcagagttcatggaatgtaactatatcatcctttatccctgaggtcacctggaatcagattattaagggaataagccatgacgtcaatagcagcccagggcacttcagagtagagggcttgggaagatcttttaaaaaggcagtaggcccggtgtggtggctcacgcctataatcccagcactttgggaggctgaagtgggtggatcaccagaggtcaggagttcgagaccagcccagccaacatggcaaaaccccatctctactaaaaatacaaaaatgagctaggcatggtggcacacgcctgtaatcccagctacacctgaggctgaggcaggagaattgcttgaaccggggagacggaggttgcagtgagccgagtttgggccactgcactctagcctggcaacagagcaagactccgtctcaaaaaaagggcaataaatgccctctctgaatgtttgaactgccaagaaaaggcatggagacagcgaactagaagaaagggcaagaaggaaatagccaccgtctacagatggcttagttaagtcatccacagcccaagggcggggctatgccttgtctggggaccctgtagagtcactgaccctggagcggctctcctgagaggtgctgcaggcaaagtgagactgacacctcactgaggaagggagacatattcttggagaactttccatctgcttgtattttccatacacatccccagccagaagttagtgtccgaagaccgaattttattttacagagcttgaaaactcacttcaatgaacaaagggattctccaggattccaaagttttgaagtcatcttagctttccacaggagggagagaacttaaaaaagcaacagtagcagggaattgatccacttcttaatgctttcctccctggcatgaccatcctgtcctttgttattatcctgcattttacgtctttggaggaacagctccctagtggcttcctccgtctgcaatgtcccttgcacagcccacacatgaaccatccttcccatgatgccgctcttctgtcatcccgctcctgctgaaacacctcccaggggctccacctgttcaggagctgaagcccatgctttcccaccagcatgtcactcccagaccacctccctgccctgtcctccagcttcccctcgctgtcctgctgtgtgaattcccaggttggcctggtggccatgtcgcctgcccccagcactcctctgtctctgctcttgcctgcacccttcctcctcctttgcctaggaggccttctcgcattttctctagctgatcagaattttaccaaaattcagaacatcctccaattccacagtctctgggagactttccctaagaggcgacttcctctccagccttctctctctggtcaggcccactgcagagatggtggtgagcacatctgggaggctggtctccctccagctggaattgctgctctctgagggagaggctgtggtggctgtctctgtccctcactgccttccaggagcaatttgcacatgtaacatagatttatgtaatgctttatgtttaaaaacattccccaattatcttatttaatttttgcaattattctaattttatatatagagaaagtgacctattttttaaaaaaatcacactctaagttctattgaacctaggacttgagcctccatttctggcttctagtctggtgttctgagtacttgatttcaggtcaataacggtcccccctcactccacactggcacgtttgtgagaagaaatgacattttgctaggaagtgaccgagtctaggaatgcttttattcaagacaccaaattccaaacttctaaatgttggaattttcaaaaattgtgtttagattttatgaaaaactcttctactttcatctattctttccctagaggcaaacatttcttaaaatgtttcattttcattaaaaatgaaagccaaatttatatgccaccgattgcaggacacaagcacagttttaagagttgtatgaacatggagaggacttttggtttttatatttctcgtatttaatatgggtgaacaccaacttttatttggaataataattttcctcctaaacaaaaacacattgagtttaagtctctgactcttgcctttccacctgctttctcctgggcccgctttgcctgcttgaaggaacagtgctgttctggagctgctgttccaacagacagggcctagctttcatttgacacacagactacagccagaagcccatggagcagggatgtcacgtcttgaaaagcctattagatgttttacaaatttaattttgcagattattttagtctgtcatccagaaaatgtgtcagcatgcatagtgctaagaaagcaagccaatttggaaacttaggttagtgacaaaattggccagagagtgggggtgatgatgaccaagaattacaagtagaatggcagctggaatttaaggagggacaagaatcaatggataagcgtgggtggaggaagatccaaacagaaaagtgcaaagttattccccatcttccaagggttgaattctggaggaagaagacacattcctagttccccgtgaacttcctttgacttattgtccccactaaaacaaaacaaaaaacttttaatgccttccacattaattagattttcttgcagtttttttatggcatttttttaaagatgccctaagtgttgaagaagagtttgcaaatgcaacaaaatatttaattaccggttgttaaaactggtttagcacaatttatattttccctctcttgcctttcttatttgcaataaaaggtattgagccattttttaaatgacatttttgataaattatgtttgtactagttgatgaaggagttttttttaacctgtttatataattttgcagcagaagccaaattttttgtatattaaagcaccaaattcatgtacagcatgcatcacggatcaatagactgtacttattttccaataaaattttcaaactttgtactgttaaaaaaaaaaaaaaaaaa

SEQ ID NO: 108 - DNA, 5065 bp, Homo sapiens
aggatggcccatgaagacctccaaacaagctggaggggccagtcacttgctgaagactagcgaagtggagggggaaagcccgagggagctgcagactcgaccactgcgccctcccctcctctccctgcaaggagcccaaggtagacgcaccctctgaagatggtgactccctcctgagaagctggaccccttggtaaaagacaaggccttctccaagaagaatatgaaagtgttactcagacttatttgtttcatagctctactgatttcttctctggaggctgataaatgcaaggaacgtgaagaaaaaataattttagtgtcatctgcaaatgaaattgatgttcgtccctgtcctcttaacccaaatgaacacaaaggcactataacttggtataaagatgacagcaagacacctgtatctacagaacaagcctccaggattcatcaacacaaagagaaactttggtttgttcctgctaaggtggaggattcaggacattactattgcgtggtaagaaattcatcttactgcctcagaattaaaataagtgcaaaatttgtggagaatgagcctaacttatgttataatgcacaagccatatttaagcagaaactacccgttgcaggagacggaggacttgtgtgcccttatatggagttttttaaaaatgaaaataatgagttacctaaattacagtggtataaggattgcaaacctctacttcttgacaatatacactttagtggagtcaaagataggctcatcgtgatgaatgtggctgaaaagcatagagggaactatacttgtcatgcatcctacacatacttgggcaagcaatatcctattacccgggtaatagaatttattactctagaggaaaacaaacccacaaggcctgtgattgtgagcccagctaatgagacaatggaagtagacttgggatcccagatacaattgatctgtaatgtcaccggccagttgagtgacattgcttactggaagtggaatgggtcagtaattgatgaagatgacccagtgctaggggaagactattacagtgtggaaaatcctgcaaacaaaagaaggagtaccctcatcacagtgcttaatatatcggaaattgaaagtagattttataaacatccatttacctgttttgccaagaatacacatggtatagatgcagcatatatccagttaatatatccagtcactaatttccagaagcacatgattggtatatgtgtcacgttgacagtcataattgtgtgttctgttttcatctataaaatcttcaagattgacattgtgctttggtacagggattcctgctatgattttctcccaataaaagcttcagatggaaagacctatgacgcatatatactgtatccaaagactgttggggaagggtctacctctgactgtgatatttttgtgtttaaagtcttgcctgaggtcttggaaaaacagtgtggatataagctgttcatttatggaagggatgactacgttggggaagacattgttgaggtcattaatgaaaacgtaaagaaaagcagaagactgattatcattttagtcagagaaacatcaggcttcagctggctgggtggttcatctgaagagcaaatagccatgtataatgctcttgttcaggatggaattaaagttgtcctgcttgagctggagaaaatccaagactatgagaaaatgccagaatcgattaaattcattaagcagaaacatggggctatccgctggtcaggggactttacacagggaccacagtctgcaaagacaaggttctggaagaatgtcaggtaccacatgccagtccagcgacggtcaccttcatctaaacaccagttactgtcaccagccactaaggagaaactgcaaagagaggctcacgtgcctctcgggtagcatggagaagttgccaagagttctttaggtgcctcctgtcttatggcgttgcaggccaggttatgcctcatgctgacttgcagagttcatggaatgtaactatatcatcctttatccctgaggtcacctggaatcagattattaagggaataagccatgacgtcaatagcagcccagggcacttcagagtagagggcttgggaagatcttttaaaaaggcagtaggcccggtgtggtggctcacgcctataatcccagcactttgggaggctgaagtgggtggatcaccagaggtcaggagttcgagaccagcccagccaacatggcaaaaccccatctctactaaaaatacaaaaatgagctaggcatggtggcacacgcctgtaatcccagctacacctgaggctgaggcaggagaattgcttgaaccggggagacggaggttgcagtgagccgagtttgggccactgcactctagcctggcaacagagcaagactccgtctcaaaaaaagggcaataaatgccctctctgaatgtttgaactgccaagaaaaggcatggagacagcgaactagaagaaagggcaagaaggaaatagccaccgtctacagatggcttagttaagtcatccacagcccaagggcggggctatgccttgtctggggaccctgtagagtcactgaccctggagcggctctcctgagaggtgctgcaggcaaagtgagactgacacctcactgaggaagggagacatattcttggagaactttccatctgcttgtattttccatacacatccccagccagaagttagtgtccgaagaccgaattttattttacagagcttgaaaactcacttcaatgaacaaagggattctccaggattccaaagttttgaagtcatcttagctttccacaggagggagagaacttaaaaaagcaacagtagcagggaattgatccacttcttaatgctttcctccctggcatgaccatcctgtcctttgttattatcctgcattttacgtctttggaggaacagctccctagtggcttcctccgtctgcaatgtcccttgcacagcccacacatgaaccatccttcccatgatgccgctcttctgtcatcccgctcctgctgaaacacctcccaggggctccacctgttcaggagctgaagcccatgctttcccaccagcatgtcactcccagaccacctccctgccctgtcctccagcttcccctcgctgtcctgctgtgtgaattcccaggttggcctggtggccatgtcgcctgcccccagcactcctctgtctctgctcttgcctgcacccttcctcctcctttgcctaggaggccttctcgcattttctctagctgatcagaattttaccaaaattcagaacatcctccaattccacagtctctgggagactttccctaagaggcgacttcctctccagccttctctctctggtcaggcccactgcagagatggtggtgagcacatctgggaggctggtctccctccagctggaattgctgctctctgagggagaggctgtggtggctgtctctgtccctcactgccttccaggagcaatttgcacatgtaacatagatttatgtaatgctttatgtttaaaaacattccccaattatcttatttaatttttgcaattattctaattttatatatagagaaagtgacctattttttaaaaaaatcacactctaagttctattgaacctaggacttgagcctccatttctggcttctagtctggtgttctgagtacttgatttcaggtcaataacggtcccccctcactccacactggcacgtttgtgagaagaaatgacattttgctaggaagtgaccgagtctaggaatgcttttattcaagacaccaaattccaaacttctaaatgttggaattttcaaaaattgtgtttagattttatgaaaaactcttctactttcatctattctttccctagaggcaaacatttcttaaaatgtttcattttcattaaaaatgaaagccaaatttatatgccaccgattgcaggacacaagcacagttttaagagttgtatgaacatggagaggacttttggtttttatatttctcgtatttaatatgggtgaacaccaacttttatttggaataataattttcctcctaaacaaaaacacattgagtttaagtctctgactcttgcctttccacctgctttctcctgggcccgctttgcctgcttgaaggaacagtgctgttctggagctgctgttccaacagacagggcctagctttcatttgacacacagactacagccagaagcccatggagcagggatgtcacgtcttgaaaagcctattagatgttttacaaatttaattttgcagattattttagtctgtcatccagaaaatgtgtcagcatgcatagtgctaagaaagcaagccaatttggaaacttaggttagtgacaaaattggccagagagtgggggtgatgatgaccaagaattacaagtagaatggcagctggaatttaaggagggacaagaatcaatggataagcgtgggtggaggaagatccaaacagaaaagtgcaaagttattccccatcttccaagggttgaattctggaggaagaagacacattcctagttccccgtgaacttcctttgacttattgtccccactaaaacaaaacaaaaaacttttaatgccttccacattaattagattttcttgcagtttttttatggcatttttttaaagatgccctaagtgttgaagaagagtttgcaaatgcaacaaaatatttaattaccggttgttaaaactggtttagcacaatttatattttccctctcttgcctttcttatttgcaataaaaggtattgagccattttttaaatgacatttttgataaattatgtttgtactagttgatgaaggagttttttttaacctgtttatataattttgcagcagaagccaaattttttgtatattaaagcaccaaattcatgtacagcatgcatcacggatcaatagactgtacttattttccaataaaattttcaaactttgtactgttaaaaaaaaaaaaaaaaaa

SEQ ID NO: 109 - DNA, 5007 bp, Homo sapiens
ctgatgccctggagtcgccaactcaattcgcgggtcgcagccaggctccatgggggtagtagagccaggtcgtagtggctaggtagacgcaccctctgaagatggtgactccctcctgagaagctggaccccttggtaaaagacaaggccttctccaagaagaatatgaaagtgttactcagacttatttgtttcatagctctactgatttcttctctggaggctgataaatgcaaggaacgtgaagaaaaaataattttagtgtcatctgcaaatgaaattgatgttcgtccctgtcctcttaacccaaatgaacacaaaggcactataacttggtataaagatgacagcaagacacctgtatctacagaacaagcctccaggattcatcaacacaaagagaaactttggtttgttcctgctaaggtggaggattcaggacattactattgcgtggtaagaaattcatcttactgcctcagaattaaaataagtgcaaaatttgtggagaatgagcctaacttatgttataatgcacaagccatatttaagcagaaactacccgttgcaggagacggaggacttgtgtgcccttatatggagttttttaaaaatgaaaataatgagttacctaaattacagtggtataaggattgcaaacctctacttcttgacaatatacactttagtggagtcaaagataggctcatcgtgatgaatgtggctgaaaagcatagagggaactatacttgtcatgcatcctacacatacttgggcaagcaatatcctattacccgggtaatagaatttattactctagaggaaaacaaacccacaaggcctgtgattgtgagcccagctaatgagacaatggaagtagacttgggatcccagatacaattgatctgtaatgtcaccggccagttgagtgacattgcttactggaagtggaatgggtcagtaattgatgaagatgacccagtgctaggggaagactattacagtgtggaaaatcctgcaaacaaaagaaggagtaccctcatcacagtgcttaatatatcggaaattgaaagtagattttataaacatccatttacctgttttgccaagaatacacatggtatagatgcagcatatatccagttaatatatccagtcactaatttccagaagcacatgattggtatatgtgtcacgttgacagtcataattgtgtgttctgttttcatctataaaatcttcaagattgacattgtgctttggtacagggattcctgctatgattttctcccaataaaagcttcagatggaaagacctatgacgcatatatactgtatccaaagactgttggggaagggtctacctctgactgtgatatttttgtgtttaaagtcttgcctgaggtcttggaaaaacagtgtggatataagctgttcatttatggaagggatgactacgttggggaagacattgttgaggtcattaatgaaaacgtaaagaaaagcagaagactgattatcattttagtcagagaaacatcaggcttcagctggctgggtggttcatctgaagagcaaatagccatgtataatgctcttgttcaggatggaattaaagttgtcctgcttgagctggagaaaatccaagactatgagaaaatgccagaatcgattaaattcattaagcagaaacatggggctatccgctggtcaggggactttacacagggaccacagtctgcaaagacaaggttctggaagaatgtcaggtaccacatgccagtccagcgacggtcaccttcatctaaacaccagttactgtcaccagccactaaggagaaactgcaaagagaggctcacgtgcctctcgggtagcatggagaagttgccaagagttctttaggtgcctcctgtcttatggcgttgcaggccaggttatgcctcatgctgacttgcagagttcatggaatgtaactatatcatcctttatccctgaggtcacctggaatcagattattaagggaataagccatgacgtcaatagcagcccagggcacttcagagtagagggcttgggaagatcttttaaaaaggcagtaggcccggtgtggtggctcacgcctataatcccagcactttgggaggctgaagtgggtggatcaccagaggtcaggagttcgagaccagcccagccaacatggcaaaaccccatctctactaaaaatacaaaaatgagctaggcatggtggcacacgcctgtaatcccagctacacctgaggctgaggcaggagaattgcttgaaccggggagacggaggttgcagtgagccgagtttgggccactgcactctagcctggcaacagagcaagactccgtctcaaaaaaagggcaataaatgccctctctgaatgtttgaactgccaagaaaaggcatggagacagcgaactagaagaaagggcaagaaggaaatagccaccgtctacagatggcttagttaagtcatccacagcccaagggcggggctatgccttgtctggggaccctgtagagtcactgaccctggagcggctctcctgagaggtgctgcaggcaaagtgagactgacacctcactgaggaagggagacatattcttggagaactttccatctgcttgtattttccatacacatccccagccagaagttagtgtccgaagaccgaattttattttacagagcttgaaaactcacttcaatgaacaaagggattctccaggattccaaagttttgaagtcatcttagctttccacaggagggagagaacttaaaaaagcaacagtagcagggaattgatccacttcttaatgctttcctccctggcatgaccatcctgtcctttgttattatcctgcattttacgtctttggaggaacagctccctagtggcttcctccgtctgcaatgtcccttgcacagcccacacatgaaccatccttcccatgatgccgctcttctgtcatcccgctcctgctgaaacacctcccaggggctccacctgttcaggagctgaagcccatgctttcccaccagcatgtcactcccagaccacctccctgccctgtcctccagcttcccctcgctgtcctgctgtgtgaattcccaggttggcctggtggccatgtcgcctgcccccagcactcctctgtctctgctcttgcctgcacccttcctcctcctttgcctaggaggccttctcgcattttctctagctgatcagaattttaccaaaattcagaacatcctccaattccacagtctctgggagactttccctaagaggcgacttcctctccagccttctctctctggtcaggcccactgcagagatggtggtgagcacatctgggaggctggtctccctccagctggaattgctgctctctgagggagaggctgtggtggctgtctctgtccctcactgccttccaggagcaatttgcacatgtaacatagatttatgtaatgctttatgtttaaaaacattccccaattatcttatttaatttttgcaattattctaattttatatatagagaaagtgacctattttttaaaaaaatcacactctaagttctattgaacctaggacttgagcctccatttctggcttctagtctggtgttctgagtacttgatttcaggtcaataacggtcccccctcactccacactggcacgtttgtgagaagaaatgacattttgctaggaagtgaccgagtctaggaatgcttttattcaagacaccaaattccaaacttctaaatgttggaattttcaaaaattgtgtttagattttatgaaaaactcttctactttcatctattctttccctagaggcaaacatttcttaaaatgtttcattttcattaaaaatgaaagccaaatttatatgccaccgattgcaggacacaagcacagttttaagagttgtatgaacatggagaggacttttggtttttatatttctcgtatttaatatgggtgaacaccaacttttatttggaataataattttcctcctaaacaaaaacacattgagtttaagtctctgactcttgcctttccacctgctttctcctgggcccgctttgcctgcttgaaggaacagtgctgttctggagctgctgttccaacagacagggcctagctttcatttgacacacagactacagccagaagcccatggagcagggatgtcacgtcttgaaaagcctattagatgttttacaaatttaattttgcagattattttagtctgtcatccagaaaatgtgtcagcatgcatagtgctaagaaagcaagccaatttggaaacttaggttagtgacaaaattggccagagagtgggggtgatgatgaccaagaattacaagtagaatggcagctggaatttaaggagggacaagaatcaatggataagcgtgggtggaggaagatccaaacagaaaagtgcaaagttattccccatcttccaagggttgaattctggaggaagaagacacattcctagttccccgtgaacttcctttgacttattgtccccactaaaacaaaacaaaaaacttttaatgccttccacattaattagattttcttgcagtttttttatggcatttttttaaagatgccctaagtgttgaagaagagtttgcaaatgcaacaaaatatttaattaccggttgttaaaactggtttagcacaatttatattttccctctcttgcctttcttatttgcaataaaaggtattgagccattttttaaatgacatttttgataaattatgtttgtactagttgatgaaggagttttttttaacctgtttatataattttgcagcagaagccaaattttttgtatattaaagcaccaaattcatgtacagcatgcatcacggatcaatagactgtacttattttccaataaaattttcaaactttgtactgttaaaaaaaaaaaaaaaaaa

SEQ ID NO: 110 - DNA, 4858 bp, Homo sapiens
gtagacgcaccctctgaagatggtgactccctcctgagaagctggaccccttggtaaaagacaaggccttctccaagataaatgcaaggaacgtgaagaaaaaataattttagtgtcatctgcaaatgaaattgatgttcgtccctgtcctcttaacccaaatgaacacaaaggcactataacttggtataaagatgacagcaagacacctgtatctacagaacaagcctccaggattcatcaacacaaagagaaactttggtttgttcctgctaaggtggaggattcaggacattactattgcgtggtaagaaattcatcttactgcctcagaattaaaataagtgcaaaatttgtggagaatgagcctaacttatgttataatgcacaagccatatttaagcagaaactacccgttgcaggagacggaggacttgtgtgcccttatatggagttttttaaaaatgaaaataatgagttacctaaattacagtggtataaggattgcaaacctctacttcttgacaatatacactttagtggagtcaaagataggctcatcgtgatgaatgtggctgaaaagcatagagggaactatacttgtcatgcatcctacacatacttgggcaagcaatatcctattacccgggtaatagaatttattactctagaggaaaacaaacccacaaggcctgtgattgtgagcccagctaatgagacaatggaagtagacttgggatcccagatacaattgatctgtaatgtcaccggccagttgagtgacattgcttactggaagtggaatgggtcagtaattgatgaagatgacccagtgctaggggaagactattacagtgtggaaaatcctgcaaacaaaagaaggagtaccctcatcacagtgcttaatatatcggaaattgaaagtagattttataaacatccatttacctgttttgccaagaatacacatggtatagatgcagcatatatccagttaatatatccagtcactaatttccagaagcacatgattggtatatgtgtcacgttgacagtcataattgtgtgttctgttttcatctataaaatcttcaagattgacattgtgctttggtacagggattcctgctatgattttctcccaataaaagcttcagatggaaagacctatgacgcatatatactgtatccaaagactgttggggaagggtctacctctgactgtgatatttttgtgtttaaagtcttgcctgaggtcttggaaaaacagtgtggatataagctgttcatttatggaagggatgactacgttggggaagacattgttgaggtcattaatgaaaacgtaaagaaaagcagaagactgattatcattttagtcagagaaacatcaggcttcagctggctgggtggttcatctgaagagcaaatagccatgtataatgctcttgttcaggatggaattaaagttgtcctgcttgagctggagaaaatccaagactatgagaaaatgccagaatcgattaaattcattaagcagaaacatggggctatccgctggtcaggggactttacacagggaccacagtctgcaaagacaaggttctggaagaatgtcaggtaccacatgccagtccagcgacggtcaccttcatctaaacaccagttactgtcaccagccactaaggagaaactgcaaagagaggctcacgtgcctctcgggtagcatggagaagttgccaagagttctttaggtgcctcctgtcttatggcgttgcaggccaggttatgcctcatgctgacttgcagagttcatggaatgtaactatatcatcctttatccctgaggtcacctggaatcagattattaagggaataagccatgacgtcaatagcagcccagggcacttcagagtagagggcttgggaagatcttttaaaaaggcagtaggcccggtgtggtggctcacgcctataatcccagcactttgggaggctgaagtgggtggatcaccagaggtcaggagttcgagaccagcccagccaacatggcaaaaccccatctctactaaaaatacaaaaatgagctaggcatggtggcacacgcctgtaatcccagctacacctgaggctgaggcaggagaattgcttgaaccggggagacggaggttgcagtgagccgagtttgggccactgcactctagcctggcaacagagcaagactccgtctcaaaaaaagggcaataaatgccctctctgaatgtttgaactgccaagaaaaggcatggagacagcgaactagaagaaagggcaagaaggaaatagccaccgtctacagatggcttagttaagtcatccacagcccaagggcggggctatgccttgtctggggaccctgtagagtcactgaccctggagcggctctcctgagaggtgctgcaggcaaagtgagactgacacctcactgaggaagggagacatattcttggagaactttccatctgcttgtattttccatacacatccccagccagaagttagtgtccgaagaccgaattttattttacagagcttgaaaactcacttcaatgaacaaagggattctccaggattccaaagttttgaagtcatcttagctttccacaggagggagagaacttaaaaaagcaacagtagcagggaattgatccacttcttaatgctttcctccctggcatgaccatcctgtcctttgttattatcctgcattttacgtctttggaggaacagctccctagtggcttcctccgtctgcaatgtcccttgcacagcccacacatgaaccatccttcccatgatgccgctcttctgtcatcccgctcctgctgaaacacctcccaggggctccacctgttcaggagctgaagcccatgctttcccaccagcatgtcactcccagaccacctccctgccctgtcctccagcttcccctcgctgtcctgctgtgtgaattcccaggttggcctggtggccatgtcgcctgcccccagcactcctctgtctctgctcttgcctgcacccttcctcctcctttgcctaggaggccttctcgcattttctctagctgatcagaattttaccaaaattcagaacatcctccaattccacagtctctgggagactttccctaagaggcgacttcctctccagccttctctctctggtcaggcccactgcagagatggtggtgagcacatctgggaggctggtctccctccagctggaattgctgctctctgagggagaggctgtggtggctgtctctgtccctcactgccttccaggagcaatttgcacatgtaacatagatttatgtaatgctttatgtttaaaaacattccccaattatcttatttaatttttgcaattattctaattttatatatagagaaagtgacctattttttaaaaaaatcacactctaagttctattgaacctaggacttgagcctccatttctggcttctagtctggtgttctgagtacttgatttcaggtcaataacggtcccccctcactccacactggcacgtttgtgagaagaaatgacattttgctaggaagtgaccgagtctaggaatgcttttattcaagacaccaaattccaaacttctaaatgttggaattttcaaaaattgtgtttagattttatgaaaaactcttctactttcatctattctttccctagaggcaaacatttcttaaaatgtttcattttcattaaaaatgaaagccaaatttatatgccaccgattgcaggacacaagcacagttttaagagttgtatgaacatggagaggacttttggtttttatatttctcgtatttaatatgggtgaacaccaacttttatttggaataataattttcctcctaaacaaaaacacattgagtttaagtctctgactcttgcctttccacctgctttctcctgggcccgctttgcctgcttgaaggaacagtgctgttctggagctgctgttccaacagacagggcctagctttcatttgacacacagactacagccagaagcccatggagcagggatgtcacgtcttgaaaagcctattagatgttttacaaatttaattttgcagattattttagtctgtcatccagaaaatgtgtcagcatgcatagtgctaagaaagcaagccaatttggaaacttaggttagtgacaaaattggccagagagtgggggtgatgatgaccaagaattacaagtagaatggcagctggaatttaaggagggacaagaatcaatggataagcgtgggtggaggaagatccaaacagaaaagtgcaaagttattccccatcttccaagggttgaattctggaggaagaagacacattcctagttccccgtgaacttcctttgacttattgtccccactaaaacaaaacaaaaaacttttaatgccttccacattaattagattttcttgcagtttttttatggcatttttttaaagatgccctaagtgttgaagaagagtttgcaaatgcaacaaaatatttaattaccggttgttaaaactggtttagcacaatttatattttccctctcttgcctttcttatttgcaataaaaggtattgagccattttttaaatgacatttttgataaattatgtttgtactagttgatgaaggagttttttttaacctgtttatataattttgcagcagaagccaaattttttgtatattaaagcaccaaattcatgtacagcatgcatcacggatcaatagactgtacttattttccaataaaattttcaaactttgtactgttaaaaaaaaaaaaaaaaaa

SEQ ID NO: 111 - DNA, 4735 bp, Homo sapiens
gtagacgcaccctctgaagatggtgactccctcctgagaagctggaccccttggtaaaagacaaggccttctccaagaagaatatgaaagtgttactcagacttatttgtttcatagctctactgatttcttctctggaggctgataaatgcaaggaacgtgaagaaaaaataattttagtgtcatctgcaaatgaaattgatgttcgtccctgtcctcttaacccaaatgaacacaaaggcactataacttggtataaagatgacagcaagacacctgtatctacagaacaagcctccaggattcatcaacacaaagagaaactttggtttgttcctgctaaggtggaggattcaggacattactattgcgtggtaaggattgcaaacctctacttcttgacaatatacactttagtggagtcaaagataggctcatcgtgatgaatgtggctgaaaagcatagagggaactatacttgtcatgcatcctacacatacttgggcaagcaatatcctattacccgggtaatagaatttattactctagaggaaaacaaacccacaaggcctgtgattgtgagcccagctaatgagacaatggaagtagacttgggatcccagatacaattgatctgtaatgtcaccggccagttgagtgacattgcttactggaagtggaatgggtcagtaattgatgaagatgacccagtgctaggggaagactattacagtgtggaaaatcctgcaaacaaaagaaggagtaccctcatcacagtgcttaatatatcggaaattgaaagtagattttataaacatccatttacctgttttgccaagaatacacatggtatagatgcagcatatatccagttaatatatccagtcactaatttccagaagcacatgattggtatatgtgtcacgttgacagtcataattgtgtgttctgttttcatctataaaatcttcaagattgacattgtgctttggtacagggattcctgctatgattttctcccaataaaagcttcagatggaaagacctatgacgcatatatactgtatccaaagactgttggggaagggtctacctctgactgtgatatttttgtgtttaaagtcttgcctgaggtcttggaaaaacagtgtggatataagctgttcatttatggaagggatgactacgttggggaagacattgttgaggtcattaatgaaaacgtaaagaaaagcagaagactgattatcattttagtcagagaaacatcaggcttcagctggctgggtggttcatctgaagagcaaatagccatgtataatgctcttgttcaggatggaattaaagttgtcctgcttgagctggagaaaatccaagactatgagaaaatgccagaatcgattaaattcattaagcagaaacatggggctatccgctggtcaggggactttacacagggaccacagtctgcaaagacaaggttctggaagaatgtcaggtaccacatgccagtccagcgacggtcaccttcatctaaacaccagttactgtcaccagccactaaggagaaactgcaaagagaggctcacgtgcctctcgggtagcatggagaagttgccaagagttctttaggtgcctcctgtcttatggcgttgcaggccaggttatgcctcatgctgacttgcagagttcatggaatgtaactatatcatcctttatccctgaggtcacctggaatcagattattaagggaataagccatgacgtcaatagcagcccagggcacttcagagtagagggcttgggaagatcttttaaaaaggcagtaggcccggtgtggtggctcacgcctataatcccagcactttgggaggctgaagtgggtggatcaccagaggtcaggagttcgagaccagcccagccaacatggcaaaaccccatctctactaaaaatacaaaaatgagctaggcatggtggcacacgcctgtaatcccagctacacctgaggctgaggcaggagaattgcttgaaccggggagacggaggttgcagtgagccgagtttgggccactgcactctagcctggcaacagagcaagactccgtctcaaaaaaagggcaataaatgccctctctgaatgtttgaactgccaagaaaaggcatggagacagcgaactagaagaaagggcaagaaggaaatagccaccgtctacagatggcttagttaagtcatccacagcccaagggcggggctatgccttgtctggggaccctgtagagtcactgaccctggagcggctctcctgagaggtgctgcaggcaaagtgagactgacacctcactgaggaagggagacatattcttggagaactttccatctgcttgtattttccatacacatccccagccagaagttagtgtccgaagaccgaattttattttacagagcttgaaaactcacttcaatgaacaaagggattctccaggattccaaagttttgaagtcatcttagctttccacaggagggagagaacttaaaaaagcaacagtagcagggaattgatccacttcttaatgctttcctccctggcatgaccatcctgtcctttgttattatcctgcattttacgtctttggaggaacagctccctagtggcttcctccgtctgcaatgtcccttgcacagcccacacatgaaccatccttcccatgatgccgctcttctgtcatcccgctcctgctgaaacacctcccaggggctccacctgttcaggagctgaagcccatgctttcccaccagcatgtcactcccagaccacctccctgccctgtcctccagcttcccctcgctgtcctgctgtgtgaattcccaggttggcctggtggccatgtcgcctgcccccagcactcctctgtctctgctcttgcctgcacccttcctcctcctttgcctaggaggccttctcgcattttctctagctgatcagaattttaccaaaattcagaacatcctccaattccacagtctctgggagactttccctaagaggcgacttcctctccagccttctctctctggtcaggcccactgcagagatggtggtgagcacatctgggaggctggtctccctccagctggaattgctgctctctgagggagaggctgtggtggctgtctctgtccctcactgccttccaggagcaatttgcacatgtaacatagatttatgtaatgctttatgtttaaaaacattccccaattatcttatttaatttttgcaattattctaattttatatatagagaaagtgacctattttttaaaaaaatcacactctaagttctattgaacctaggacttgagcctccatttctggcttctagtctggtgttctgagtacttgatttcaggtcaataacggtcccccctcactccacactggcacgtttgtgagaagaaatgacattttgctaggaagtgaccgagtctaggaatgcttttattcaagacaccaaattccaaacttctaaatgttggaattttcaaaaattgtgtttagattttatgaaaaactcttctactttcatctattctttccctagaggcaaacatttcttaaaatgtttcattttcattaaaaatgaaagccaaatttatatgccaccgattgcaggacacaagcacagttttaagagttgtatgaacatggagaggacttttggtttttatatttctcgtatttaatatgggtgaacaccaacttttatttggaataataattttcctcctaaacaaaaacacattgagtttaagtctctgactcttgcctttccacctgctttctcctgggcccgctttgcctgcttgaaggaacagtgctgttctggagctgctgttccaacagacagggcctagctttcatttgacacacagactacagccagaagcccatggagcagggatgtcacgtcttgaaaagcctattagatgttttacaaatttaattttgcagattattttagtctgtcatccagaaaatgtgtcagcatgcatagtgctaagaaagcaagccaatttggaaacttaggttagtgacaaaattggccagagagtgggggtgatgatgaccaagaattacaagtagaatggcagctggaatttaaggagggacaagaatcaatggataagcgtgggtggaggaagatccaaacagaaaagtgcaaagttattccccatcttccaagggttgaattctggaggaagaagacacattcctagttccccgtgaacttcctttgacttattgtccccactaaaacaaaacaaaaaacttttaatgccttccacattaattagattttcttgcagtttttttatggcatttttttaaagatgccctaagtgttgaagaagagtttgcaaatgcaacaaaatatttaattaccggttgttaaaactggtttagcacaatttatattttccctctcttgcctttcttatttgcaataaaaggtattgagccattttttaaatgacatttttgataaattatgtttgtactagttgatgaaggagttttttttaacctgtttatataattttgcagcagaagccaaattttttgtatattaaagcaccaaattcatgtacagcatgcatcacggatcaatagactgtacttattttccaataaaattttcaaactttgtactgttaaaaaaaaaaaaaaaaaa

SEQ ID NO: 112 - DNA, 4756 bp, Homo sapiens
gtagacgcaccctctgaagatggtgactccctcctgagaagctggaccccttggtaaaagacaaggccttctccaagaagaatatgaaagtgttactcagacttatttgtttcatagctctactgatttcttctctggaggctgataaatgcaaggaacgtgaagaaaaaataattttagtgtcatctgcaaatgaaattgatgttcgtccctgtcctcttaacccaaatgaacacaaaggcactataacttggtataaagatgacagcaagacacctgtatctacagaacaagcctccaggattcatcaacacaaagagaaactttggtttgttcctgctaaggtggaggattcaggacattactattgcgtggtaagaaattcatcttactgcctcagaattaaaataagtgcaaaatttgtggagaatgagcctaacttatgttataatgcacaagccatatttaagcagaaactacccgttgcaggagacggaggacttgtgtgcccttatatggagttttttaaaaatgaaaataatgagttacctaaattacagtggtataagaggaaaacaaacccacaaggcctgtgattgtgagcccagctaatgagacaatggaagtagacttgggatcccagatacaattgatctgtaatgtcaccggccagttgagtgacattgcttactggaagtggaatgggtcagtaattgatgaagatgacccagtgctaggggaagactattacagtgtggaaaatcctgcaaacaaaagaaggagtaccctcatcacagtgcttaatatatcggaaattgaaagtagattttataaacatccatttacctgttttgccaagaatacacatggtatagatgcagcatatatccagttaatatatccagtcactaatttccagaagcacatgattggtatatgtgtcacgttgacagtcataattgtgtgttctgttttcatctataaaatcttcaagattgacattgtgctttggtacagggattcctgctatgattttctcccaataaaagcttcagatggaaagacctatgacgcatatatactgtatccaaagactgttggggaagggtctacctctgactgtgatatttttgtgtttaaagtcttgcctgaggtcttggaaaaacagtgtggatataagctgttcatttatggaagggatgactacgttggggaagacattgttgaggtcattaatgaaaacgtaaagaaaagcagaagactgattatcattttagtcagagaaacatcaggcttcagctggctgggtggttcatctgaagagcaaatagccatgtataatgctcttgttcaggatggaattaaagttgtcctgcttgagctggagaaaatccaagactatgagaaaatgccagaatcgattaaattcattaagcagaaacatggggctatccgctggtcaggggactttacacagggaccacagtctgcaaagacaaggttctggaagaatgtcaggtaccacatgccagtccagcgacggtcaccttcatctaaacaccagttactgtcaccagccactaaggagaaactgcaaagagaggctcacgtgcctctcgggtagcatggagaagttgccaagagttctttaggtgcctcctgtcttatggcgttgcaggccaggttatgcctcatgctgacttgcagagttcatggaatgtaactatatcatcctttatccctgaggtcacctggaatcagattattaagggaataagccatgacgtcaatagcagcccagggcacttcagagtagagggcttgggaagatcttttaaaaaggcagtaggcccggtgtggtggctcacgcctataatcccagcactttgggaggctgaagtgggtggatcaccagaggtcaggagttcgagaccagcccagccaacatggcaaaaccccatctctactaaaaatacaaaaatgagctaggcatggtggcacacgcctgtaatcccagctacacctgaggctgaggcaggagaattgcttgaaccggggagacggaggttgcagtgagccgagtttgggccactgcactctagcctggcaacagagcaagactccgtctcaaaaaaagggcaataaatgccctctctgaatgtttgaactgccaagaaaaggcatggagacagcgaactagaagaaagggcaagaaggaaatagccaccgtctacagatggcttagttaagtcatccacagcccaagggcggggctatgccttgtctggggaccctgtagagtcactgaccctggagcggctctcctgagaggtgctgcaggcaaagtgagactgacacctcactgaggaagggagacatattcttggagaactttccatctgcttgtattttccatacacatccccagccagaagttagtgtccgaagaccgaattttattttacagagcttgaaaactcacttcaatgaacaaagggattctccaggattccaaagttttgaagtcatcttagctttccacaggagggagagaacttaaaaaagcaacagtagcagggaattgatccacttcttaatgctttcctccctggcatgaccatcctgtcctttgttattatcctgcattttacgtctttggaggaacagctccctagtggcttcctccgtctgcaatgtcccttgcacagcccacacatgaaccatccttcccatgatgccgctcttctgtcatcccgctcctgctgaaacacctcccaggggctccacctgttcaggagctgaagcccatgctttcccaccagcatgtcactcccagaccacctccctgccctgtcctccagcttcccctcgctgtcctgctgtgtgaattcccaggttggcctggtggccatgtcgcctgcccccagcactcctctgtctctgctcttgcctgcacccttcctcctcctttgcctaggaggccttctcgcattttctctagctgatcagaattttaccaaaattcagaacatcctccaattccacagtctctgggagactttccctaagaggcgacttcctctccagccttctctctctggtcaggcccactgcagagatggtggtgagcacatctgggaggctggtctccctccagctggaattgctgctctctgagggagaggctgtggtggctgtctctgtccctcactgccttccaggagcaatttgcacatgtaacatagatttatgtaatgctttatgtttaaaaacattccccaattatcttatttaatttttgcaattattctaattttatatatagagaaagtgacctattttttaaaaaaatcacactctaagttctattgaacctaggacttgagcctccatttctggcttctagtctggtgttctgagtacttgatttcaggtcaataacggtcccccctcactccacactggcacgtttgtgagaagaaatgacattttgctaggaagtgaccgagtctaggaatgcttttattcaagacaccaaattccaaacttctaaatgttggaattttcaaaaattgtgtttagattttatgaaaaactcttctactttcatctattctttccctagaggcaaacatttcttaaaatgtttcattttcattaaaaatgaaagccaaatttatatgccaccgattgcaggacacaagcacagttttaagagttgtatgaacatggagaggacttttggtttttatatttctcgtatttaatatgggtgaacaccaacttttatttggaataataattttcctcctaaacaaaaacacattgagtttaagtctctgactcttgcctttccacctgctttctcctgggcccgctttgcctgcttgaaggaacagtgctgttctggagctgctgttccaacagacagggcctagctttcatttgacacacagactacagccagaagcccatggagcagggatgtcacgtcttgaaaagcctattagatgttttacaaatttaattttgcagattattttagtctgtcatccagaaaatgtgtcagcatgcatagtgctaagaaagcaagccaatttggaaacttaggttagtgacaaaattggccagagagtgggggtgatgatgaccaagaattacaagtagaatggcagctggaatttaaggagggacaagaatcaatggataagcgtgggtggaggaagatccaaacagaaaagtgcaaagttattccccatcttccaagggttgaattctggaggaagaagacacattcctagttccccgtgaacttcctttgacttattgtccccactaaaacaaaacaaaaaacttttaatgccttccacattaattagattttcttgcagtttttttatggcatttttttaaagatgccctaagtgttgaagaagagtttgcaaatgcaacaaaatatttaattaccggttgttaaaactggtttagcacaatttatattttccctctcttgcctttcttatttgcaataaaaggtattgagccattttttaaatgacatttttgataaattatgtttgtactagttgatgaaggagttttttttaacctgtttatataattttgcagcagaagccaaattttttgtatattaaagcaccaaattcatgtacagcatgcatcacggatcaatagactgtacttattttccaataaaattttcaaactttgtactgttaaaaaaaaaaaaaaaaaa

SEQ ID NO: 113 - DNA, 950 bp, Homo sapiens
attaaagccctaagaggctgtgacacagccatctccaaaaccccactttctccttcctttgagcctccgtaccagctggggcgtccggcaagatgtgagttgtcactctgctgcggcacagacctgaattaacaactctagctagggctgacttcaaaaagcactttcgttttttaataaccaacatcagctcagcaggcttcatttgggaaaagaaaccttgtcggattaccccgacattctccacctcctgggaggccagccattcccaaatgccccaaggatgaagaacggagacggtagacgcaccctctgaagatggtgactccctcctgagaagctggaccccttggtaaaagacaaggccttctccaagaagaatatgaaagtgttactcagacttatttgtttcatagctctactgatttcttctctggaggctgataaatgcaaggaacgtgaagaaaaaataattttagtgtcatctgcaaatgaaattgatgttcgtccctgtcctcttaacccaaatgaacacaaaggcactataacttggtataaagatgacagcaagacacctgtatctacagaacaagcctccaggattcatcaacacaaagagaaactttggtttgttcctgctaaggtggaggattcaggacattactattgcgtggtaagaaattcatcttactgcctcagaattaaaataagtgcaaaatttgtggagaatgagcctaacttatgttataatgcacaagccatatttaagcagaaactacccgttgcaggagacggaggacttgtgtgcccttatatggagttttttaaaaatgaaaataatgagttacctaaattacagtggtataaggtaattttattttaaatatgacatttcacttttccagaaaataaaatagttccctggacaatagaaaaaaaaaaaaaaaaaa

SEQ ID NO: 114 - DNA, 4801 bp, Homo sapiens
aaagggggaaaagaaagtgcggcggaaagtaagaggctcactggggaagactgccgggatccaggtctccggggtccgctttggccagaggcgcggaaggaagcagtgcccggcgacactgcacccatcccggctgcttttgctgcgccctctcagcttcccaagaaaggcatcgtcatgtgatcatcacctaagaactagaacatcagcaggccctagaagcctcactcttgcccctccctttaatatctcaaaggatgacacttctgtggtgtgtagtgagtctctacttttatggaatcctgcaaagtgatgcctcagaacgctgcgatgactggggactagacaccatgaggcaaatccaagtgtttgaagatgagccagctcgcatcaagtgcccactctttgaacacttcttgaaattcaactacagcacagcccattcagctggccttactctgatctggtattggactaggcaggaccgggaccttgaggagccaattaacttccgcctccccgagaaccgcattagtaaggagaaagatgtgctgtggttccggcccactctcctcaatgacactggcaactatacctgcatgttaaggaacactacatattgcagcaaagttgcatttcccttggaagttgttcaaaaagacagctgtttcaattcccccatgaaactcccagtgcataaactgtatatagaatatggcattcagaggatcacttgtccaaatgtagatggatattttccttccagtgtcaaaccgactatcacttggtatatgggctgttataaaatacagaattttaataatgtaatacccgaaggtatgaacttgagtttcctcattgccttaatttcaaataatggaaattacacatgtgttgttacatatccagaaaatggacgtacgtttcatctcaccaggactctgactgtaaaggtagtaggctctccaaaaaatgcagtgccccctgtgatccattcacctaatgatcatgtggtctatgagaaagaaccaggagaggagctactcattccctgtacggtctattttagttttctgatggattctcgcaatgaggtttggtggaccattgatggaaaaaaacctgatgacatcactattgatgtcaccattaacgaaagtataagtcatagtagaacagaagatgaaacaagaactcagattttgagcatcaagaaagttacctctgaggatctcaagcgcagctatgtctgtcatgctagaagtgccaaaggcgaagttgccaaagcagccaaggtgaagcagaaagtgccagctccaagatacacagtggaactggcttgtggttttggagccacagtcctgctagtggtgattctcattgttgtttaccatgtttactggctagagatggtcctattttaccgggctcattttggaacagatgaaaccattttagatggaaaagagtatgatatttatgtatcctatgcaaggaatgcggaagaagaagaatttgtattactgaccctccgtggagttttggagaatgaatttggatacaagctgtgcatctttgaccgagacagtctgcctgggggaattgtcacagatgagactttgagcttcattcagaaaagcagacgcctcctggttgttctaagccccaactacgtgctccagggaacccaagccctcctggagctcaaggctggcctagaaaatatggcctctcggggcaacatcaacgtcattttagtacagtacaaagctgtgaaggaaacgaaggtgaaagagctgaagagggctaagacggtgctcacggtcattaaatggaaaggggaaaaatccaagtatccacagggcaggttctggaagcagctgcaggtggccatgccagtgaagaaaagtcccaggcggtctagcagtgatgagcagggcctctcgtattcatctttgaaaaatgtatgaaaggaataatgaaaagggtaaaaagaacaaggggtgctccaggaagaaagagtccccccagtcttcattcgcagtttatggtttcataggcaaaaataatggtctaagcctcccaatagggataaatttagggtgactgtgtggctgactattctgcttcctcaggcaacactaaagtttagaaagatatcatcaacgttctgtcaccagtctctgatgccactatgttctttgcaggcaaagacttgttcaatgcgaatttccccttctacattgtctatccctgtttttatatgtctccattctttttaaaatcttaacatatggagcagcctttcctatgaatttaaatatgcctttaaaataagtcactgttgacagggtcatgagtttccgagtatagttttctttttatcttatttttactcgtccgttgaaaagataatcaaggcctacattttagctgaggataatgaacttttttcctcattcggctgtataatacataaccacagcaagactgacatccacttaggatgatacaaagcagtgtaactgaaaatgtttcttttaattgatttaaaggacttgtcttctataccacccttgtcctcatctcaggtaatttatgaaatctatgtaaacttgaaaaatatttcttaatttttgtttttgctccagtcaattcctgattatccacaggtcaacccacattttttcattccttctccctatctgcttatatcgcattgctcatttagagtttgcaggaggctccatactaggttcagtctgaaagaaatctcctaatggtgctatagagagggaggtaacagaaagactcttttagggcatttttctgactcatgaaaagagcacagaaaaggatgtttggcaatttgtcttttaagtcttaaccttgctaatgtgaatactgggaaagtgattttttctcactcgtttttgttgctccattgtaaagggcggaggtcagtcttagtggccttgagagttgcttttggcattaatattctaagagaattaactgtatttcctgtcacctattcactagtgcaggaaatatacttgctccaaataagtcagtatgagaagtcactgtcaatgaaagttgttttgtttgttttcagtaatattttgctgtttttaagacttggaaaactaagtgcagagtttacagagtggtaaatatctatgttacatgtagattatacatatatatacacacgtgtatatgagatatatatcttatatctccacaaacacaaattatatatatacatatccacacacatacattacatatatctgtgtatataaatccacatgcacatgaaatatatatatatatataatttgtgtgtgtgtatgtgtatgtatatgactttaaatagctatgggtacaatattaaaaaccactggaactcttgtccagtttttaaattatgtttttactggaatgtttttgtgtcagtgttttctgtacatattatttgttaattcacagctcacagagtgatagttgtcatagttcttgccttccctaagtttatataaataacttaagtattgctacagtttatctaggttgcagtggcatctgctgtgcacagagcttccatggtcactgctaagcagtagccagccatcgggcattaattgatttcctactatattcccagcagacacatttagaaactaagctatgttaacctcagtgctcaactatttgaactgttgagtgataaaggaaacaaatataactgtaaatgaatcttggtatcctgtgaaacagaataattcgtaatttaagaaagcccttatcccggtaacatgaatgttgatgaacaaatgtaaaattatatcctatatttaagtacccataataaatcatttccctctataagtgttattgattattttaaattgaaaaaagtttcacttggatgaaaaaagtagaaaagtaggtcattcttggatctacttttttttagccttattaatatttttccctattagaaaccacaattactccctctattaacccttcacttactagaccagaaaagaacttattccagataagctttgaatatcaattcttacataaactttaggcaaacagggaatagtctagtcaccaaaggaccattctcttgccaatgctgcattccttttgcacttttggattccatatttatcccaaatgctgttgggcacccctagaaataccttgatgttttttctatttatatgcctgcctttggtacttaattttacaaatgctgtaatataaagcatatcaagtttatgtgatacgtatcattgcaagagaatttgtttcaagatttttttttaatgttccagaagatggccaatagagaacattcaagggaaatggggaaacataatttagagaacaagaacaaaccatgtctcaaatttttttaaaaaaaattaatggttttaaatatatgctatagggacgttccatgcccaggttaacaaagaactgtgatatatagagtgtctaattacaaaatcatatacgatttatttaattctcttctgtattgtaacttagatgattcccaaggactctaataaaaaatcacttcattgtatttggaaacaaaaacatcattcattaattacttattttctttccataggttttaatattttgagagtgtcttttttatttcattcatgaacttttgtatttttcatttttcatttgatttgtaaatttacttatgttaaaaataaaccatttattttcagctttgaattttaaaaaaaaaaaaaaaaaa

SEQ ID NO: 115 - DNA, 2114 bp, Homo sapiens
aaagggggaaaagaaagtgcggcggaaagtaagaggctcactggggaagactgccgggatccaggtctccggggtccgctttggccagaggcgcggaaggaagcagtgcccggcgacactgcacccatcccggctgcttttgctgcgccctctcagcttcccaagaaaggcatcgtcatgtgatcatcacctaagaactagaacatcagcaggccctagaagcctcactcttgcccctccctttaatatctcaaaggatgacacttctgtggtgtgtagtgagtctctacttttatggaatcctgcaaagtgatgcctcagaacgctgcgatgactggggactagacaccatgaggcaaatccaagtgtttgaagatgagccagctcgcatcaagtgcccactctttgaacacttcttgaaattcaactacagcacagcccattcagctggccttactctgatctggtattggactaggcaggaccgggaccttgaggagccaattaacttccgcctccccgagaaccgcattagtaaggagaaagatgtgctgtggttccggcccactctcctcaatgacactggcaactatacctgcatgttaaggaacactacatattgcagcaaagttgcatttcccttggaagttgttcaaaaagacagctgtttcaattcccccatgaaactcccagtgcataaactgtatatagaatatggcattcagaggatcacttgtccaaatgtagatggatattttccttccagtgtcaaaccgactatcacttggtatatgggctgttataaaatacagaattttaataatgtaatacccgaaggtatgaacttgagtttcctcattgccttaatttcaaataatggaaattacacatgtgttgttacatatccagaaaatggacgtacgtttcatctcaccaggactctgactgtaaaggtagtaggctctccaaaaaatgcagtgccccctgtgatccattcacctaatgatcatgtggtctatgagaaagaaccaggagaggagctactcattccctgtacggtctattttagttttctgatggattctcgcaatgaggtttggtggaccattgatggaaaaaaacctgatgacatcactattgatgtcaccattaacgaaagtataagtcatagtagaacagaagatgaaacaagaactcagattttgagcatcaagaaagttacctctgaggatctcaagcgcagctatgtctgtcatgctagaagtgccaaaggcgaagttgccaaagcagccaaggtgaagcagaaaggtaatagatgcggtcagtgatgaatctctcagctccaaattaacattgtggtgaataaggacaaaaggagagattgagaacaagagagctccagcacctagcccgacggcatctaacccatagtaatgaatcaaacttaaatgaaaaatatgaaagttttcatctatgtaagatactcaaaatattgtttctgatattgttagtaccgtaatgcccaaatgtagctaaaaaaatcgacgtgagtacagtgagacacaattttgtgtctgtacaattatgaaaaattaaaaacaaagaaaatattcaaagctaccaaagatagaaaaaactggtagagccacatattgttggtgaattattaagacccttttaaaaatcattcatggtagacttcaagagtcataaaaaagattgcatcatctgacctaagactttcggaatttttcctgaacaaataacagaaagggaattatataccttttaatattattagaagcattatctgtagttgtaaaacattattaatagcagccatccaattgtatgcaactaattaaggtattgaatgtttattttccaaaaatgcataattataatattattttaaacactatgtatcaatatttaagcaggtttataatataccagcagccacaattgctaaaatgaaaatcatttaaattatgattttaaatggtataaacatgatttctatgttgatagtactatattattctacaataaatggaaattataaagccttcttgtcagaagtgctgctcctaaaaaaaaaaaaaaaaaaaaaa

SEQ ID NO: 116 - DNA, 4965 bp, Homo sapiens
aaagggggaaaagaaagtgcggcggaaagtaagaggctcactggggaagactgccgggatccaggtctccggggtccgctttggccagaggcgcggaaggaagcagtgcccggcgacactgcacccatcccggctgcttttgctgcgccctctcagcttcccaagaaagggctttgacctgaagcttgaaattgagtttgggacaataatgtgtctcatggggaattgcatggactccttatcataagccaaatgctgaggtaaagctgcggaattgagtcgtcctccaagaagggagagaaaatgatgtcttgtgacatttccagataactggcatcgtcatgtgatcatcacctaagaactagaacatcagcaggccctagaagcctcactcttgcccctccctttaatatctcaaaggatgacacttctgtggtgtgtagtgagtctctacttttatggaatcctgcaaagtgatgcctcagaacgctgcgatgactggggactagacaccatgaggcaaatccaagtgtttgaagatgagccagctcgcatcaagtgcccactctttgaacacttcttgaaattcaactacagcacagcccattcagctggccttactctgatctggtattggactaggcaggaccgggaccttgaggagccaattaacttccgcctccccgagaaccgcattagtaaggagaaagatgtgctgtggttccggcccactctcctcaatgacactggcaactatacctgcatgttaaggaacactacatattgcagcaaagttgcatttcccttggaagttgttcaaaaagacagctgtttcaattcccccatgaaactcccagtgcataaactgtatatagaatatggcattcagaggatcacttgtccaaatgtagatggatattttccttccagtgtcaaaccgactatcacttggtatatgggctgttataaaatacagaattttaataatgtaatacccgaaggtatgaacttgagtttcctcattgccttaatttcaaataatggaaattacacatgtgttgttacatatccagaaaatggacgtacgtttcatctcaccaggactctgactgtaaaggtagtaggctctccaaaaaatgcagtgccccctgtgatccattcacctaatgatcatgtggtctatgagaaagaaccaggagaggagctactcattccctgtacggtctattttagttttctgatggattctcgcaatgaggtttggtggaccattgatggaaaaaaacctgatgacatcactattgatgtcaccattaacgaaagtataagtcatagtagaacagaagatgaaacaagaactcagattttgagcatcaagaaagttacctctgaggatctcaagcgcagctatgtctgtcatgctagaagtgccaaaggcgaagttgccaaagcagccaaggtgaagcagaaagtgccagctccaagatacacagtggaactggcttgtggttttggagccacagtcctgctagtggtgattctcattgttgtttaccatgtttactggctagagatggtcctattttaccgggctcattttggaacagatgaaaccattttagatggaaaagagtatgatatttatgtatcctatgcaaggaatgcggaagaagaagaatttgtattactgaccctccgtggagttttggagaatgaatttggatacaagctgtgcatctttgaccgagacagtctgcctgggggaattgtcacagatgagactttgagcttcattcagaaaagcagacgcctcctggttgttctaagccccaactacgtgctccagggaacccaagccctcctggagctcaaggctggcctagaaaatatggcctctcggggcaacatcaacgtcattttagtacagtacaaagctgtgaaggaaacgaaggtgaaagagctgaagagggctaagacggtgctcacggtcattaaatggaaaggggaaaaatccaagtatccacagggcaggttctggaagcagctgcaggtggccatgccagtgaagaaaagtcccaggcggtctagcagtgatgagcagggcctctcgtattcatctttgaaaaatgtatgaaaggaataatgaaaagggtaaaaagaacaaggggtgctccaggaagaaagagtccccccagtcttcattcgcagtttatggtttcataggcaaaaataatggtctaagcctcccaatagggataaatttagggtgactgtgtggctgactattctgcttcctcaggcaacactaaagtttagaaagatatcatcaacgttctgtcaccagtctctgatgccactatgttctttgcaggcaaagacttgttcaatgcgaatttccccttctacattgtctatccctgtttttatatgtctccattctttttaaaatcttaacatatggagcagcctttcctatgaatttaaatatgcctttaaaataagtcactgttgacagggtcatgagtttccgagtatagttttctttttatcttatttttactcgtccgttgaaaagataatcaaggcctacattttagctgaggataatgaacttttttcctcattcggctgtataatacataaccacagcaagactgacatccacttaggatgatacaaagcagtgtaactgaaaatgtttcttttaattgatttaaaggacttgtcttctataccacccttgtcctcatctcaggtaatttatgaaatctatgtaaacttgaaaaatatttcttaatttttgtttttgctccagtcaattcctgattatccacaggtcaacccacattttttcattccttctccctatctgcttatatcgcattgctcatttagagtttgcaggaggctccatactaggttcagtctgaaagaaatctcctaatggtgctatagagagggaggtaacagaaagactcttttagggcatttttctgactcatgaaaagagcacagaaaaggatgtttggcaatttgtcttttaagtcttaaccttgctaatgtgaatactgggaaagtgattttttctcactcgtttttgttgctccattgtaaagggcggaggtcagtcttagtggccttgagagttgcttttggcattaatattctaagagaattaactgtatttcctgtcacctattcactagtgcaggaaatatacttgctccaaataagtcagtatgagaagtcactgtcaatgaaagttgttttgtttgttttcagtaatattttgctgtttttaagacttggaaaactaagtgcagagtttacagagtggtaaatatctatgttacatgtagattatacatatatatacacacgtgtatatgagatatatatcttatatctccacaaacacaaattatatatatacatatccacacacatacattacatatatctgtgtatataaatccacatgcacatgaaatatatatatatatataatttgtgtgtgtgtatgtgtatgtatatgactttaaatagctatgggtacaatattaaaaaccactggaactcttgtccagtttttaaattatgtttttactggaatgtttttgtgtcagtgttttctgtacatattatttgttaattcacagctcacagagtgatagttgtcatagttcttgccttccctaagtttatataaataacttaagtattgctacagtttatctaggttgcagtggcatctgctgtgcacagagcttccatggtcactgctaagcagtagccagccatcgggcattaattgatttcctactatattcccagcagacacatttagaaactaagctatgttaacctcagtgctcaactatttgaactgttgagtgataaaggaaacaaatataactgtaaatgaatcttggtatcctgtgaaacagaataattcgtaatttaagaaagcccttatcccggtaacatgaatgttgatgaacaaatgtaaaattatatcctatatttaagtacccataataaatcatttccctctataagtgttattgattattttaaattgaaaaaagtttcacttggatgaaaaaagtagaaaagtaggtcattcttggatctacttttttttagccttattaatatttttccctattagaaaccacaattactccctctattaacccttcacttactagaccagaaaagaacttattccagataagctttgaatatcaattcttacataaactttaggcaaacagggaatagtctagtcaccaaaggaccattctcttgccaatgctgcattccttttgcacttttggattccatatttatcccaaatgctgttgggcacccctagaaataccttgatgttttttctatttatatgcctgcctttggtacttaattttacaaatgctgtaatataaagcatatcaagtttatgtgatacgtatcattgcaagagaatttgtttcaagatttttttttaatgttccagaagatggccaatagagaacattcaagggaaatggggaaacataatttagagaacaagaacaaaccatgtctcaaatttttttaaaaaaaattaatggttttaaatatatgctatagggacgttccatgcccaggttaacaaagaactgtgatatatagagtgtctaattacaaaatcatatacgatttatttaattctcttctgtattgtaacttagatgattcccaaggactctaataaaaaatcacttcattgtatttggaaacaaaaacatcattcattaattacttattttctttccataggttttaatattttgagagtgtcttttttatttcattcatgaacttttgtatttttcatttttcatttgatttgtaaatttacttatgttaaaaataaaccatttattttcagctttgaattttaaaaaaaaaaaaaaaaaa

SEQ ID NO: 117 - DNA, 4714 bp, Homo sapiens
aaagggggaaaagaaagtgcggcggaaagtaagaggctcactggggaagactgccgggatccaggtctccggggtccgctttggccagaggcgcggaaggaagcagtgcccggcgacactgcacccatcccggctgcttttgctgcgccctctcagcttcccaagaaaggatgacacttctgtggtgtgtagtgagtctctacttttatggaatcctgcaaagtgatgcctcagaacgctgcgatgactggggactagacaccatgaggcaaatccaagtgtttgaagatgagccagctcgcatcaagtgcccactctttgaacacttcttgaaattcaactacagcacagcccattcagctggccttactctgatctggtattggactaggcaggaccgggaccttgaggagccaattaacttccgcctccccgagaaccgcattagtaaggagaaagatgtgctgtggttccggcccactctcctcaatgacactggcaactatacctgcatgttaaggaacactacatattgcagcaaagttgcatttcccttggaagttgttcaaaaagacagctgtttcaattcccccatgaaactcccagtgcataaactgtatatagaatatggcattcagaggatcacttgtccaaatgtagatggatattttccttccagtgtcaaaccgactatcacttggtatatgggctgttataaaatacagaattttaataatgtaatacccgaaggtatgaacttgagtttcctcattgccttaatttcaaataatggaaattacacatgtgttgttacatatccagaaaatggacgtacgtttcatctcaccaggactctgactgtaaaggtagtaggctctccaaaaaatgcagtgccccctgtgatccattcacctaatgatcatgtggtctatgagaaagaaccaggagaggagctactcattccctgtacggtctattttagttttctgatggattctcgcaatgaggtttggtggaccattgatggaaaaaaacctgatgacatcactattgatgtcaccattaacgaaagtataagtcatagtagaacagaagatgaaacaagaactcagattttgagcatcaagaaagttacctctgaggatctcaagcgcagctatgtctgtcatgctagaagtgccaaaggcgaagttgccaaagcagccaaggtgaagcagaaagtgccagctccaagatacacagtggaactggcttgtggttttggagccacagtcctgctagtggtgattctcattgttgtttaccatgtttactggctagagatggtcctattttaccgggctcattttggaacagatgaaaccattttagatggaaaagagtatgatatttatgtatcctatgcaaggaatgcggaagaagaagaatttgtattactgaccctccgtggagttttggagaatgaatttggatacaagctgtgcatctttgaccgagacagtctgcctgggggaattgtcacagatgagactttgagcttcattcagaaaagcagacgcctcctggttgttctaagccccaactacgtgctccagggaacccaagccctcctggagctcaaggctggcctagaaaatatggcctctcggggcaacatcaacgtcattttagtacagtacaaagctgtgaaggaaacgaaggtgaaagagctgaagagggctaagacggtgctcacggtcattaaatggaaaggggaaaaatccaagtatccacagggcaggttctggaagcagctgcaggtggccatgccagtgaagaaaagtcccaggcggtctagcagtgatgagcagggcctctcgtattcatctttgaaaaatgtatgaaaggaataatgaaaagggtaaaaagaacaaggggtgctccaggaagaaagagtccccccagtcttcattcgcagtttatggtttcataggcaaaaataatggtctaagcctcccaatagggataaatttagggtgactgtgtggctgactattctgcttcctcaggcaacactaaagtttagaaagatatcatcaacgttctgtcaccagtctctgatgccactatgttctttgcaggcaaagacttgttcaatgcgaatttccccttctacattgtctatccctgtttttatatgtctccattctttttaaaatcttaacatatggagcagcctttcctatgaatttaaatatgcctttaaaataagtcactgttgacagggtcatgagtttccgagtatagttttctttttatcttatttttactcgtccgttgaaaagataatcaaggcctacattttagctgaggataatgaacttttttcctcattcggctgtataatacataaccacagcaagactgacatccacttaggatgatacaaagcagtgtaactgaaaatgtttcttttaattgatttaaaggacttgtcttctataccacccttgtcctcatctcaggtaatttatgaaatctatgtaaacttgaaaaatatttcttaatttttgtttttgctccagtcaattcctgattatccacaggtcaacccacattttttcattccttctccctatctgcttatatcgcattgctcatttagagtttgcaggaggctccatactaggttcagtctgaaagaaatctcctaatggtgctatagagagggaggtaacagaaagactcttttagggcatttttctgactcatgaaaagagcacagaaaaggatgtttggcaatttgtcttttaagtcttaaccttgctaatgtgaatactgggaaagtgattttttctcactcgtttttgttgctccattgtaaagggcggaggtcagtcttagtggccttgagagttgcttttggcattaatattctaagagaattaactgtatttcctgtcacctattcactagtgcaggaaatatacttgctccaaataagtcagtatgagaagtcactgtcaatgaaagttgttttgtttgttttcagtaatattttgctgtttttaagacttggaaaactaagtgcagagtttacagagtggtaaatatctatgttacatgtagattatacatatatatacacacgtgtatatgagatatatatcttatatctccacaaacacaaattatatatatacatatccacacacatacattacatatatctgtgtatataaatccacatgcacatgaaatatatatatatatataatttgtgtgtgtgtatgtgtatgtatatgactttaaatagctatgggtacaatattaaaaaccactggaactcttgtccagtttttaaattatgtttttactggaatgtttttgtgtcagtgttttctgtacatattatttgttaattcacagctcacagagtgatagttgtcatagttcttgccttccctaagtttatataaataacttaagtattgctacagtttatctaggttgcagtggcatctgctgtgcacagagcttccatggtcactgctaagcagtagccagccatcgggcattaattgatttcctactatattcccagcagacacatttagaaactaagctatgttaacctcagtgctcaactatttgaactgttgagtgataaaggaaacaaatataactgtaaatgaatcttggtatcctgtgaaacagaataattcgtaatttaagaaagcccttatcccggtaacatgaatgttgatgaacaaatgtaaaattatatcctatatttaagtacccataataaatcatttccctctataagtgttattgattattttaaattgaaaaaagtttcacttggatgaaaaaagtagaaaagtaggtcattcttggatctacttttttttagccttattaatatttttccctattagaaaccacaattactccctctattaacccttcacttactagaccagaaaagaacttattccagataagctttgaatatcaattcttacataaactttaggcaaacagggaatagtctagtcaccaaaggaccattctcttgccaatgctgcattccttttgcacttttggattccatatttatcccaaatgctgttgggcacccctagaaataccttgatgttttttctatttatatgcctgcctttggtacttaattttacaaatgctgtaatataaagcatatcaagtttatgtgatacgtatcattgcaagagaatttgtttcaagatttttttttaatgttccagaagatggccaatagagaacattcaagggaaatggggaaacataatttagagaacaagaacaaaccatgtctcaaatttttttaaaaaaaattaatggttttaaatatatgctatagggacgttccatgcccaggttaacaaagaactgtgatatatagagtgtctaattacaaaatcatatacgatttatttaattctcttctgtattgtaacttagatgattcccaaggactctaataaaaaatcacttcattgtatttggaaacaaaaacatcattcattaattacttattttctttccataggttttaatattttgagagtgtcttttttatttcattcatgaacttttgtatttttcatttttcatttgatttgtaaatttacttatgttaaaaataaaccatttattttcagctttgaattttaaaaaaaaaaaaaaaaaa

SEQ ID NO: 118 - DNA, 2027 bp, Homo sapiens
aaagggggaaaagaaagtgcggcggaaagtaagaggctcactggggaagactgccgggatccaggtctccggggtccgctttggccagaggcgcggaaggaagcagtgcccggcgacactgcacccatcccggctgcttttgctgcgccctctcagcttcccaagaaaggatgacacttctgtggtgtgtagtgagtctctacttttatggaatcctgcaaagtgatgcctcagaacgctgcgatgactggggactagacaccatgaggcaaatccaagtgtttgaagatgagccagctcgcatcaagtgcccactctttgaacacttcttgaaattcaactacagcacagcccattcagctggccttactctgatctggtattggactaggcaggaccgggaccttgaggagccaattaacttccgcctccccgagaaccgcattagtaaggagaaagatgtgctgtggttccggcccactctcctcaatgacactggcaactatacctgcatgttaaggaacactacatattgcagcaaagttgcatttcccttggaagttgttcaaaaagacagctgtttcaattcccccatgaaactcccagtgcataaactgtatatagaatatggcattcagaggatcacttgtccaaatgtagatggatattttccttccagtgtcaaaccgactatcacttggtatatgggctgttataaaatacagaattttaataatgtaatacccgaaggtatgaacttgagtttcctcattgccttaatttcaaataatggaaattacacatgtgttgttacatatccagaaaatggacgtacgtttcatctcaccaggactctgactgtaaaggtagtaggctctccaaaaaatgcagtgccccctgtgatccattcacctaatgatcatgtggtctatgagaaagaaccaggagaggagctactcattccctgtacggtctattttagttttctgatggattctcgcaatgaggtttggtggaccattgatggaaaaaaacctgatgacatcactattgatgtcaccattaacgaaagtataagtcatagtagaacagaagatgaaacaagaactcagattttgagcatcaagaaagttacctctgaggatctcaagcgcagctatgtctgtcatgctagaagtgccaaaggcgaagttgccaaagcagccaaggtgaagcagaaaggtaatagatgcggtcagtgatgaatctctcagctccaaattaacattgtggtgaataaggacaaaaggagagattgagaacaagagagctccagcacctagcccgacggcatctaacccatagtaatgaatcaaacttaaatgaaaaatatgaaagttttcatctatgtaagatactcaaaatattgtttctgatattgttagtaccgtaatgcccaaatgtagctaaaaaaatcgacgtgagtacagtgagacacaattttgtgtctgtacaattatgaaaaattaaaaacaaagaaaatattcaaagctaccaaagatagaaaaaactggtagagccacatattgttggtgaattattaagacccttttaaaaatcattcatggtagacttcaagagtcataaaaaagattgcatcatctgacctaagactttcggaatttttcctgaacaaataacagaaagggaattatataccttttaatattattagaagcattatctgtagttgtaaaacattattaatagcagccatccaattgtatgcaactaattaaggtattgaatgtttattttccaaaaatgcataattataatattattttaaacactatgtatcaatatttaagcaggtttataatataccagcagccacaattgctaaaatgaaaatcatttaaattatgattttaaatggtataaacatgatttctatgttgatagtactatattattctacaataaatggaaattataaagccttcttgtcagaagtgctgctcctaaaaaaaaaaaaaaaaaaaaaa

SEQ ID NO: 119 - DNA, 2930 bp, Homo sapiens
aaagggggaaaagaaagtgcggcggaaagtaagaggctcactggggaagactgccgggatccaggtctccggggtccgctttggccagaggcgcggaaggaagcagtgcccggcgacactgcacccatcccggctgcttttgctgcgccctctcagcttcccaagaaaggcatcgtcatgtgatcatcacctaagaactagaacatcagcaggccctagaagcctcactcttgcccctccctttaatatctcaaaggatgacacttctgtggtgtgtagtgagtctctacttttatggaatcctgcaaagtgatgcctcagaacgctgcgatgactggggactagacaccatgaggcaaatccaagtgtttgaagatgagccagctcgcatcaagtgcccactctttgaacacttcttgaaattcaactacagcacagcccattcagctggccttactctgatctggtattggactaggcaggaccgggaccttgaggagccaattaacttccgcctccccgagaaccgcattagtaaggagaaagatgtgctgtggttccggcccactctcctcaatgacactggcaactatacctgcatgttaaggaacactacatattgcagcaaagttgcatttcccttggaagttgttcaaaaagacagctgtttcaattcccccatgaaactcccagtgcataaactgtatatagaatatggcattcagaggatcacttgtccaaatgtagatggatattttccttccagtgtcaaaccgactatcacttggtatatgggctgttataaaatacagaattttaataatgtaatacccgaaggtatgaacttgagtttcctcattgccttaatttcaaataatggaaattacacatgtgttgttacatatccagaaaatggacgtacgtttcatctcaccaggactctgactgtaaaggtagtaggctctccaaaaaatgcagtgccccctgtgatccattcacctaatgatcatgtggtctatgagaaagaaccaggagaggagctactcattccctgtacggtctattttagttttctgatggattctcgcaatgaggtttggtggaccattgatggaaaaaaacctgatgacatcactattgatgtcaccattaacgaaagtataagtcatagtagaacagaagatgaaacaagaactcagattttgagcatcaagaaagttacctctgaggatctcaagcgcagctatgtctgtcatgctagaagtgccaaaggcgaagttgccaaagcagccaaggtgaagcagaaagtgccagctccaagatacacagtggaactggcttgtggttttggagccacagtcctgctagtggtgattctcattgttgtttaccatgtttactggctagagatggtcctattttaccgggctcattttggaacagatgaaaccattttagatggaaaagagtatgatatttatgtatcctatgcaaggaatgcggaagaagaagaatttgtattactgaccctccgtggagttttggagaatgaatttggatacaagctgtgcatctttgaccgagacagtctgcctgggggaaatacagtggaagcagtttttgatttcattcagagaagcagaaggatgattgttgttctgagccctgactatgtgacagaaaagagcatcagcatgctggagtttaaactgggtgtcatgtgccagaactccattgccaccaagctcattgtggttgagtaccgtccccttgagcacccgcacccaggcattcttcagctcaaagagtctgtgtcttttgtgagctggaagggagaaaagtccaaacattctggctctaaattctggaaagctttgcggttggctcttcccctgagaagtctgagtgccagttctggctggaatgagagctgctcttcccagtctgacatcagtctggatcacgttcaaaggaggagaagtcgtttgaaagagcccccagaacttcagagctcagagagggctgcaggtagccctccagccccaggcacaatgtccaagcaccgagggaagtcctccgccacctgccgctgttgtgtcacctactgtgaaggagagaatcaccttaggaacaagagccgggcagagattcataaccagccccagtgggagacacacctctgtaagcctgttccccaagagtcagaaactcaatggatacaaaatggcaccagattggaaccccctgctccccagatctcagcccttgctcttcatcatttcacggacttatccaataacaacgacttttatatcctataattactgtgtgtggtgggtggtggctactatctctaccaaccctctgtatgtcatgaacctgtgggaaaatctgacatttttatcatctaatggactatcagatttctgtcccctttattgatttttaaaaactatttatttctaggagacaaaagacctgaaggacctgaatccagaattattgcctctaaaggcctcagaagagcacactcttcttgggccctagaaggtcagtatgtgaaagttgcctaaagtctgatcctctatcttgtccaatggtttaaaactgagctaagaatttaaatgtgtttcttttcagtgagttgatcaacctcacattataagtcagtcaggtgtacttgggctatgatgcttacagggtgtatgcattcccagggagcagcatggaaaggagctggttctggtggaagctgtaggacgaagctcaacagaaaacctacagcacatttttcctcaaagaaccaaacatacccacccagggatacatggcgttctctgtctcactgtaaactagtgttctctaaactgcctaacattgttagcatcaataaaattctatttttacgtcaaaaaaaaaaaaaaaaaaaa

SEQ ID NO: 120 - DNA, 3661 bp, Homo sapiens
tcaggaggcggagatcgctgcttctcacctactttctgaacttggcctccgcagtcgcgacctggcgtgaaggaggagctgccgcccccgccccagcctcggggacgcctctctgaagagaagccatttgaagcagaatccaaaccatgaattgtagagaattacccttgaccctttgggtgcttatatctgtaagcactgcagaatcttgtacttcacgtccccacattactgtggttgaaggggaacctttctatctgaaacattgctcgtgttcacttgcacatgagattgaaacaaccaccaaaagctggtacaaaagcagtggatcacaggaacatgtggagctgaacccaaggagttcctcgagaattgctttgcatgattgtgttttggagttttggccagttgagttgaatgacacaggatcttactttttccaaatgaaaaattatactcagaaatggaaattaaatgtcatcagaagaaataaacacagctgtttcactgaaagacaagtaactagtaaaattgtggaagttaaaaaattttttcagataacctgtgaaaacagttactatcaaacactggtcaacagcacatcattgtataagaactgtaaaaagctactactggagaacaataaaaacccaacgataaagaagaacgccgagtttgaagatcaggggtattactcctgcgtgcatttccttcatcataatggaaaactatttaatatcaccaaaaccttcaatataacaatagtggaagatcgcagtaatatagttccggttcttcttggaccaaagcttaaccatgttgcagtggaattaggaaaaaacgtaaggctcaactgctctgctttgctgaatgaagaggatgtaatttattggatgttcggggaagaaaatggatcggatcctaatatacatgaagagaaagaaatgagaattatgactccagaaggcaaatggcatgcttcaaaagtattgagaattgaaaatattggtgaaagcaatctaaatgttttatataattgcactgtggccagcacgggaggcacagacaccaaaagcttcatcttggtgagaaaagcagacatggctgatatcccaggccacgtcttcacaagaggaatgatcatagctgttttgatcttggtggcagtagtgtgcctagtgactgtgtgtgtcatttatagagttgacttggttctattttatagacatttaacgagaagagatgaaacattaacagatggaaaaacatatgatgcttttgtgtcttacctaaaagaatgccgacctgaaaatggagaggagcacacctttgctgtggagattttgcccagggtgttggagaaacattttgggtataagttatgcatatttgaaagggatgtagtgcctggaggagctgttgttgatgaaatccactcactgatagagaaaagccgaagactaatcattgtcctaagtaaaagttatatgtctaatgaggtcaggtatgaacttgaaagtggactccatgaagcattggtggaaagaaaaattaaaataatcttaattgaatttacacctgttactgacttcacattcttgccccaatcactaaagcttttgaaatctcacagagttctgaagtggaaggccgataaatctctttcttataactcaaggttctggaagaaccttctttacttaatgcctgcaaaaacagtcaagccaggtagagacgaaccggaagtcttgcctgttctttccgagtcttaatcttcagaaacagtgaacgccaaaaagaactcaagatattctggggactgagcatatgaacctgttcataacaaaggctgtgactcgaaataattaactttgtcaaaatcctgctcacaatttgaagatgaaacttgtcattaggttggcgggaatgagactaaagattgcgctgtgggctgtggtcacgtgctcccagaagacctggaattcaaaagaaatggagctattctttttctccctctttcataactggatgcagctgctcatactcaatcccatattcagcaagtgtgaagctggacgtgatgcaaaataaccgatgccctacaaaaagggcgcatctttaagagttttaatgccagtgcttaattcgaatgaggggattttaagtgtctgaagaggcattttctagggaccagtgggtgactgagtaactgaaatgctgctttcactccctaacaccatggatctggttgtgcataggatgtgggaggaggggctggcagggccgccttcagaggctgcagggcctcagcctcaggatgcatttaatgtatcctggccacagttgcagccaacggttcttgaaagctcggtaaggccctgcaacgcagagcctgcttatgtggatctatttatgggaacttcttaaaaggaccccagaatagctctttatctttcacaagagacacaaattctaattgagttaattatctgggcctttcactttggatgctctgaaacatttgttgattttgtgtgaatgtttatatcaaaatgtttgccaggttgtattagccattgaatagcaaaaaactgatagttacttgcttgttttttaaaaattacatattaaaaatgcccttggcataaggcagcatggtgtggcagttaagagatgggctgtgcagcccatcctgagctccagtcctgagtttgctacttacttctgtggcctctggaaccttatccaacctcttggtgcttcagtttcctcatctgtgaaattagaatttataataattgcacctacctcccaggggtaactaaatgaataaatataataaagtacttacagtggttcctgacacagactcagcactccgtcagtgttgccatgactatttttattatcattattaatgattacttagatcaattatttagcagtggactaatggaagctacagagcagggaagggaagcagatctagggaggaaggcagttttgatttgaggaggtttgcacatgtagagaagcatactggagaagcatatccagagggcgaaagatatctctccattgtgcatctgcctcttttgacgttggaagacacatgtcttactccccaaagggagcccagcactgggagccttcttgatgatctcaaaaataatagctattcaagaaaatcaccaagtgactgtgaaaccgtcagttcggaaggctggttagaacatgtgggagcaacatgaatgttctacaaaagtttaaagcagagattgtttcaaatgggtgtagtagatattactgaaaaccaaaaaagagtgagattgtcagtgtaagaatgtgatttaatgtttgtagtgcttacaattttgtgtaccaactggatgactaaaaagagtaaaataatttaattaatagctcatattttatgtgtgaaaacatgttagtgaacatatataatcaaaatagatttcattgctattgcatagtctctaatacatagaatgattttgcttttctcttttattatacttgctttaaaatacttgaaatatattttgcattaaatgcatttcaagttaaatgtcttaaatgtatacattagatgtgtgttttaaaatgcataaaacacgttgaaatacattaatgaaccatt

SEQ ID NO: 121 - DNA, 3471 bp, Homo sapiens
tcaggaggcggagatcgctgcttctcacctactttctgaacttggcctccgcagtcgcgacctggcgtgaaggaggagctgccgcccccgccccagcctcggggacgcctctctgaagagaagccatttgaagcagaatccaaaccatgaattgtagagaattacccttgaccctttgggtgcttatatctgtaagcactgcagaaattatactcagaaatggaaattaaatgtcatcagaagaaataaacacagctgtttcactgaaagacaagtaactagtaaaattgtggaagttaaaaaattttttcagataacctgtgaaaacagttactatcaaacactggtcaacagcacatcattgtataagataggaccacctatttgcaggaaaacaagctcagggctccactgattctacattatgaactgtaaaaagctactactggagaacaataaaaacccaacgataaagaagaacgccgagtttgaagatcaggggtattactcctgcgtgcatttccttcatcataatggaaaactatttaatatcaccaaaaccttcaatataacaatagtggaagatcgcagtaatatagttccggttcttcttggaccaaagcttaaccatgttgcagtggaattaggaaaaaacgtaaggctcaactgctctgctttgctgaatgaagaggatgtaatttattggatgttcggggaagaaaatggatcggatcctaatatacatgaagagaaagaaatgagaattatgactccagaaggcaaatggcatgcttcaaaagtattgagaattgaaaatattggtgaaagcaatctaaatgttttatataattgcactgtggccagcacgggaggcacagacaccaaaagcttcatcttggtgagaaaagacatggctgatatcccaggccacgtcttcacaagaggaatgatcatagctgttttgatcttggtggcagtagtgtgcctagtgactgtgtgtgtcatttatagagttgacttggttctattttatagacatttaacgagaagagatgaaacattaacagatggaaaaacatatgatgcttttgtgtcttacctaaaagaatgccgacctgaaaatggagaggagcacacctttgctgtggagattttgcccagggtgttggagaaacattttgggtataagttatgcatatttgaaagggatgtagtgcctggaggagctgttgttgatgaaatccactcactgatagagaaaagccgaagactaatcattgtcctaagtaaaagttatatgtctaatgaggtcaggtatgaacttgaaagtggactccatgaagcattggtggaaagaaaaattaaaataatcttaattgaatttacacctgttactgacttcacattcttgccccaatcactaaagcttttgaaatctcacagagttctgaagtggaaggccgataaatctctttcttataactcaaggttctggaagaaccttctttacttaatgcctgcaaaaacagtcaagccaggtagagacgaaccggaagtcttgcctgttctttccgagtcttaatcttcagaaacagtgaacgccaaaaagaactcaagatattctggggactgagcatatgaacctgttcataacaaaggctgtgactcgaaataattaactttgtcaaaatcctgctcacaatttgaagatgaaacttgtcattaggttggcgggaatgagactaaagattgcgctgtgggctgtggtcacgtgctcccagaagacctggaattcaaaagaaatggagctattctttttctccctctttcataactggatgcagctgctcatactcaatcccatattcagcaagtgtgaagctggacgtgatgcaaaataaccgatgccctacaaaaagggcgcatctttaagagttttaatgccagtgcttaattcgaatgaggggattttaagtgtctgaagaggcattttctagggaccagtgggtgactgagtaactgaaatgctgctttcactccctaacaccatggatctggttgtgcataggatgtgggaggaggggctggcagggccgccttcagaggctgcagggcctcagcctcaggatgcatttaatgtatcctggccacagttgcagccaacggttcttgaaagctcggtaaggccctgcaacgcagagcctgcttatgtggatctatttatgggaacttcttaaaaggaccccagaatagctctttatctttcacaagagacacaaattctaattgagttaattatctgggcctttcactttggatgctctgaaacatttgttgattttgtgtgaatgtttatatcaaaatgtttgccaggttgtattagccattgaatagcaaaaaactgatagttacttgcttgttttttaaaaattacatattaaaaatgcccttggcataaggcagcatggtgtggcagttaagagatgggctgtgcagcccatcctgagctccagtcctgagtttgctacttacttctgtggcctctggaaccttatccaacctcttggtgcttcagtttcctcatctgtgaaattagaatttataataattgcacctacctcccaggggtaactaaatgaataaatataataaagtacttacagtggttcctgacacagactcagcactccgtcagtgttgccatgactatttttattatcattattaatgattacttagatcaattatttagcagtggactaatggaagctacagagcagggaagggaagcagatctagggaggaaggcagttttgatttgaggaggtttgcacatgtagagaagcatactggagaagcatatccagagggcgaaagatatctctccattgtgcatctgcctcttttgacgttggaagacacatgtcttactccccaaagggagcccagcactgggagccttcttgatgatctcaaaaataatagctattcaagaaaatcaccaagtgactgtgaaaccgtcagttcggaaggctggttagaacatgtgggagcaacatgaatgttctacaaaagtttaaagcagagattgtttcaaatgggtgtagtagatattactgaaaaccaaaaaagagtgagattgtcagtgtaagaatgtgatttaatgtttgtagtgcttacaattttgtgtaccaactggatgactaaaaagagtaaaataatttaattaatagctcatattttatgtgtgaaaacatgttagtgaacatatataatcaaaatagatttcattgctattgcatagtctctaatacatagaatgattttgcttttctcttttattatacttgctttaaaatacttgaaatatattttgcattaaatgcatttcaagttaaatgtcttaaatgtatacattagatgtgtgttttaaaatgcataaaacacgttgaaatacattaatgaaccatt

SEQ ID NO: 122 - DNA, 1964 bp, Homo sapiens
cccgcccacggtggcggggaaatacctaggcatggaagtggcatgacagggctcgtgtccctgtcatattttccactctccacgaggtcctgcgcgcttcaatcctgcaggcagcccggtttggggatgtggtccttgctgctctgcgggttgtccatcgcccttccactgtctgtcacagcagatggatgcaaggacatttttatgaaaaatgagatactttcagcaagccagccttttgcttttaattgtacattccctcccataacatctggggaagtcagtgtaacatggtataaaaattctagcaaaatcccagtgtccaaaatcatacagtctagaattcaccaggacgagacttggattttgtttctccccatggaatggggggactcaggagtctaccaatgtgttataaagggtagagacagctgtcatagaatacatgtaaacctaactgtttttgaaaaacattggtgtgacacttccataggtggtttaccaaatttatcagatgagtacaagcaaatattacatcttggaaaagatgatagtctcacatgtcatctgcacttcccgaagagttgtgttttgggtccaataaagtggtataaggactgtaacgagattaaaggggagcggttcactgttttggaaaccaggcttttggtgagcaatgtctcggcagaggacagagggaactacgcgtgtcaagccatactgacacactcagggaagcagtacgaggttttaaatggcatcactgtgagcattacagaaagagctggatatggaggaagtgtccctaaaatcatttatccaaaaaatcattcaattgaagtacagcttggtaccactctgattgtggactgcaatgtaacagacaccaaggataatacaaatctacgatgctggagagtcaataacactttggtggatgattactatgatgaatccaaacgaatcagagaaggggtggaaacccatgtctcttttcgggaacataatttgtacacagtaaacatcaccttcttggaagtgaaaatggaagattatggccttcctttcatgtgccacgctggagtgtccacagcatacattatattacagctcccagctccggattttcgagcttacttgataggagggcttatcgccttggtggctgtggctgtgtctgttgtgtacatatacaacatttttaagatcgacattgttctttggtatcgaagtgccttccattctacagagaccatagtagatgggaagctgtatgacgcctatgtcttataccccaagccccacaaggaaagccagaggcatgccgtggatgccctggtgttgaatatcctgcccgaggtgttggagagacaatgtggatataagttgtttatattcggcagagatgaattccctggacaagccgtggccaatgtcatcgatgaaaacgttaagctgtgcaggaggctgattgtcattgtggtccccgaatcgctgggctttggcctgttgaagaacctgtcagaagaacaaatcgcggtctacagtgccctgatccaggacgggatgaaggttattctcattgagctggagaaaatcgaggactacacagtcatgccagagtcaattcagtacatcaaacagaagcatggtgccatccggtggcatggggacttcacggagcagtcacagtgtatgaagaccaagttttggaagacagtgagataccacatgccgcccagaaggtgtcggccgtttcctccggtccagctgctgcagcacacaccttgctaccgcaccgcaggcccagaactaggctcaagaagaaagaagtgtactctcacgactggctaagacttgctggactgacacctatggctggaagatgacttgttttgctccatgtctcctcattcctacacctattttctgctgcaggatgaggctagggttagcattctaga

SEQ ID NO: 123 - DNA, 2058 bp, Homo sapiens
aaagagaggctggctgttgtatttagtaaagctataaagctgtaagagaaattggctttctgagttgtgaaactgtgggcagaaagttgaggaagaaagaactcaagtacaacccaatgaggttgagatataggctactcttcccaactcagtcttgaagagtatcaccaactgcctcatgtgtggtgaccttcactgtcgtatgccagtgactcatctggagtaatctcaacaacgagttaccaatacttgctcttgattgataaacagaatggggttttggatcttagcaattctcacaattctcatgtattccacagcagcaaagtttagtaaacaatcatggggcctggaaaatgaggctttaattgtaagatgtcctagacaaggaaaacctagttacaccgtggattggtattactcacaaacaaacaaaagtattcccactcaggaaagaaatcgtgtgtttgcctcaggccaacttctgaagtttctaccagctgcagttgctgattctggtatttatacctgtattgtcagaagtcccacattcaataggactggatatgcgaatgtcaccatatataaaaaacaatcagattgcaatgttccagattatttgatgtattcaacagtatctggatcagaaaaaaattccaaaatttattgtcctaccattgacctctacaactggacagcacctcttgagtggtttaagaattgtcaggctcttcaaggatcaaggtacagggcgcacaagtcatttttggtcattgataatgtgatgactgaggacgcaggtgattacacctgtaaatttatacacaatgaaaatggagccaattatagtgtgacggcgaccaggtccttcacggtcaaggatgagcaaggcttttctctgtttccagtaatcggagcccctgcacaaaatgaaataaaggaagtggaaattggaaaaaacgcaaacctaacttgctctgcttgttttggaaaaggcactcagttcttggctgccgtcctgtggcagcttaatggaacaaaaattacagactttggtgaaccaagaattcaacaagaggaagggcaaaatcaaagtttcagcaatgggctggcttgtctagacatggttttaagaatagctgacgtgaaggaagaggatttattgctgcagtacgactgtctggccctgaatttgcatggcttgagaaggcacaccgtaagactaagtaggaaaaatccaattgatcatcatagcatctactgcataattgcagtatgtagtgtatttttaatgctaatcaatgtcctggttatcatcctaaaaatgttctggattgaggccactctgctctggagagacatagctaaaccttacaagactaggaatgatggaaagctctatgatgcttatgttgtctacccacggaactacaaatccagtacagatggggccagtcgtgtagagcactttgttcaccagattctgcctgatgttcttgaaaataaatgtggctataccttatgcatttatgggagagatatgctacctggagaagatgtagtcactgcagtggaaaccaacatacgaaagagcaggcggcacattttcatcctgacccctcagatcactcacaataaggagtttgcctacgagcaggaggttgccctgcactgtgccctcatccagaacgacgccaaggtgatacttattgagatggaggctctgagcgagctggacatgctgcaggctgaggcgcttcaggactccctccagcatcttatgaaagtacaggggaccatcaagtggagggaggaccacattgccaataaaaggtccctgaattctaaattctggaagcacgtgaggtaccaaatgcctgtgccaagcaaaattcccagaaaggcctctagtttgactcccttggctgcccagaagcaatagtgcctgctgtgatgtgcaaaggcatctgagtttgaagctttcctgacttctcctagctggcttatgcccctgcactgaagtgtgaggagcaggaatattaaagggattcaggcctc

SEQ ID NO: 124 - DNA, 3909 bp, Homo sapiens
agtctatgaggagggacctacaaagactggaaactattcttagctccgtcactgactccaagttcatcccctctgtctttcagtttggttgagatataggctactcttcccaactcagtcttgaagagtatcaccaactgcctcatgtgtggtgaccttcactgtcgtatgccagtgactcatctggagtaatctcaacaacgagttaccaatacttgctcttgattgataaacagaatggggttttggatcttagcaattctcacaattctcatgtattccacagcagcaaagtttagtaaacaatcatggggcctggaaaatgaggctttaattgtaagatgtcctagacaaggaaaacctagttacaccgtggattggtattactcacaaacaaacaaaagtattcccactcaggaaagaaatcgtgtgtttgcctcaggccaacttctgaagtttctaccagctgcagttgctgattctggtatttatacctgtattgtcagaagtcccacattcaataggactggatatgcgaatgtcaccatatataaaaaacaatcagattgcaatgttccagattatttgatgtattcaacagtatctggatcagaaaaaaattccaaaatttattgtcctaccattgacctctacaactggacagcacctcttgagtggtttaagaattgtcaggctcttcaaggatcaaggtacagggcgcacaagtcatttttggtcattgataatgtgatgactgaggacgcaggtgattacacctgtaaatttatacacaatgaaaatggagccaattatagtgtgacggcgaccaggtccttcacggtcaaggatgagcaaggcttttctctgtttccagtaatcggagcccctgcacaaaatgaaataaaggaagtggaaattggaaaaaacgcaaacctaacttgctctgcttgttttggaaaaggcactcagttcttggctgccgtcctgtggcagcttaatggaacaaaaattacagactttggtgaaccaagaattcaacaagaggaagggcaaaatcaaagtttcagcaatgggctggcttgtctagacatggttttaagaatagctgacgtgaaggaagaggatttattgctgcagtacgactgtctggccctgaatttgcatggcttgagaaggcacaccgtaagactaagtaggaaaaatccaagtaaggagtgtttctgagactttgatcacctgaactttctctagcaagtgtaagcagaatggagtgtggttccaagagatccatcaagacaatgggaatggcctgtgccataaaatgtgcttctcttcttcgggatgttgtttgctgtctgatctttgtagactgttcctgtttgctgggagcttctctgctgcttaaattgttcgtcctcccccactccctcctatcgttggtttgtctagaacactcagctgcttctttggtcatccttgttttctaactttatgaactccctctgtgtcactgtatgtgaaaggaaatgcaccaacaaccgtaaactgaacgtgttcttttgtgctcttttataacttgcattacatgttgtaagcatggtccgttctatacctttttctggtcataatgaacactcattttgttagcgagggtggtaaagtgaacaaaaaggggaagtatcaaactactgccatttcagtgagaaaatcctaggtgctactttataataagacatttgttaggccattcttgcattgatataaagaaatacctgagactgggtgatttatatgaaaagaggtttaattggctcacagttctgcaggctgtatgggaagcatggcggcatctgcttctggggacacctcaggagctttactcatggcagaaggcaaagcaaaggcaggcacttcacacagtaaaagcaggagcgagagagaggtgccacactgaaacagccagatctcatgagaagtcactcactattgcaaggacagcatcaaagagatggtgctaaaccattcatgatgaactcacccccatgatccaatcacctcccaccaggctccacctcgaatactggggattaccattcagcatgagatttgggcaggaacacagacccaaaccataccacacacattatcattgttaaactttgtaaagtatttaaggtacatggaacacacgggaagtctggtagctcagcccatttctttattgcatctgttattcaccatgtaattcaggtaccacgtattccagggagcctttcttggccctcagtttgcagtatacacactttccaagtactcttgtagcatcctgtttgtatcatagcactggtcacattgccttacctaaatctgtttgacagtctgctcaacacgactgcaagctccatgagggcagggacatcatctcttccatctttgggtccttagtgcaatacctggcagctagccagtgctcagctaaatatttgttgactgaataaatgaatgcacaaccaaattattgataccaaatgttttttttgtgtacatttctacttctctagctataagtcttaattatacaacaaaatactatttttatatttatgtttggtaaattcaataactttcctcatcatttggaaagtcaaattgtttattgcttccctacagttttttctgaatctagcaggattttaatgatatcattataatttgacacaataaaaggacaacatgaaactgatgaatctttattgggttaatttcagacactatataatcttttaaaaatgtaacattcttttttatatataaataattggtggcatcacaaatagccaaagcagggtggagagagtgatccttcctgggtgcaggcaagaaggggatatgttttctacagagttttcaaaacagtgataaagctgtctacaagtcattgtgctttttatcatcactatgcccagacaatgtgaaacatcagagatgaagtgctcttcccacagaggtggactgatccttctccccactcccttggtgtgtctctgaatgcaatgttgtcttggaaaacagctttccaagcatttcactcctgagcacttgccagtttcctcacttgttcttcacatatccaggcaaagacatcctgtttgctatatgaagcattgtatcccgtataaaaggaaggaaagagagaaatatatttttacactcatcactcctcaggggctgtacaatcatgtagaaattgtttaatgtgcctgtcaaatagccaaagagtgttaaaccctgagttcccacccatgtgtgtggtatggttaggattcatccagatacacagagagaggcacaacaggaggagaaaggataggggtgtggggacagcgggcccccaatatggtgtaatcgtggcaggtctctgcctgaagtgctatgtggggtttttcttgttttaattttgactttaacccctgatttgtaagtttttcataaaataaacagaatcataactcatgtagatggctataagtgccgtagtgttctgtgggtctctggtgtctgccagtgataagtgtggcaccccaggaaggctgtggaccccatcaaggtgctatgtgagggccatgcttggggtggtggtgggcccagtagaccctgcagccatccatccagcctgcccactcacactgcccttgtgtactcctgctttgctacgttatcattgatcaatgtccctggttacctatgtgtttgaattatcttcgtgttacaggtgtttaatgattttgctccttctagcttatttgtatttcacctgtttttctttaaatcaacatggttacactctgtttcagcaactgtataaattaaacacaaattattactactgctaaaaaaaaaaaaaaaaaa

SEQ ID NO: 125 - DNA, 3589 bp, Homo sapiens
aaagagaggctggctgttgtatttagtaaagctataaagctgtaagagaaattggctttctgagttgtgaaactgtgggcagaaagttgaggaagaaagaactcaagtacaacccaatgagggccaacttctgaagtttctaccagctgcagttgctgattctggtatttatacctgtattgtcagaagtcccacattcaataggactggatatgcgaatgtcaccatatataaaaaacaatcagattgcaatgttccagattatttgatgtattcaacagtatctggatcagaaaaaaattccaaaatttattgtcctaccattgacctctacaactggacagcacctcttgagtggtttaagaattgtcaggctcttcaaggatcaaggtacagggcgcacaagtcatttttggtcattgataatgtgatgactgaggacgcaggtgattacacctgtaaatttatacacaatgaaaatggagccaattatagtgtgacggcgaccaggtccttcacggtcaaggatgagcaaggcttttctctgtttccagtaatcggagcccctgcacaaaatgaaataaaggaagtggaaattggaaaaaacgcaaacctaacttgctctgcttgttttggaaaaggcactcagttcttggctgccgtcctgtggcagcttaatggaacaaaaattacagactttggtgaaccaagaattcaacaagaggaagggcaaaatcaaagtttcagcaatgggctggcttgtctagacatggttttaagaatagctgacgtgaaggaagaggatttattgctgcagtacgactgtctggccctgaatttgcatggcttgagaaggcacaccgtaagactaagtaggaaaaatccaagtaaggagtgtttctgagactttgatcacctgaactttctctagcaagtgtaagcagaatggagtgtggttccaagagatccatcaagacaatgggaatggcctgtgccataaaatgtgcttctcttcttcgggatgttgtttgctgtctgatctttgtagactgttcctgtttgctgggagcttctctgctgcttaaattgttcgtcctcccccactccctcctatcgttggtttgtctagaacactcagctgcttctttggtcatccttgttttctaactttatgaactccctctgtgtcactgtatgtgaaaggaaatgcaccaacaaccgtaaactgaacgtgttcttttgtgctcttttataacttgcattacatgttgtaagcatggtccgttctatacctttttctggtcataatgaacactcattttgttagcgagggtggtaaagtgaacaaaaaggggaagtatcaaactactgccatttcagtgagaaaatcctaggtgctactttataataagacatttgttaggccattcttgcattgatataaagaaatacctgagactgggtgatttatatgaaaagaggtttaattggctcacagttctgcaggctgtatgggaagcatggcggcatctgcttctggggacacctcaggagctttactcatggcagaaggcaaagcaaaggcaggcacttcacacagtaaaagcaggagcgagagagaggtgccacactgaaacagccagatctcatgagaagtcactcactattgcaaggacagcatcaaagagatggtgctaaaccattcatgatgaactcacccccatgatccaatcacctcccaccaggctccacctcgaatactggggattaccattcagcatgagatttgggcaggaacacagacccaaaccataccacacacattatcattgttaaactttgtaaagtatttaaggtacatggaacacacgggaagtctggtagctcagcccatttctttattgcatctgttattcaccatgtaattcaggtaccacgtattccagggagcctttcttggccctcagtttgcagtatacacactttccaagtactcttgtagcatcctgtttgtatcatagcactggtcacattgccttacctaaatctgtttgacagtctgctcaacacgactgcaagctccatgagggcagggacatcatctcttccatctttgggtccttagtgcaatacctggcagctagccagtgctcagctaaatatttgttgactgaataaatgaatgcacaaccaaattattgataccaaatgttttttttgtgtacatttctacttctctagctataagtcttaattatacaacaaaatactatttttatatttatgtttggtaaattcaataactttcctcatcatttggaaagtcaaattgtttattgcttccctacagttttttctgaatctagcaggattttaatgatatcattataatttgacacaataaaaggacaacatgaaactgatgaatctttattgggttaatttcagacactatataatcttttaaaaatgtaacattcttttttatatataaataattggtggcatcacaaatagccaaagcagggtggagagagtgatccttcctgggtgcaggcaagaaggggatatgttttctacagagttttcaaaacagtgataaagctgtctacaagtcattgtgctttttatcatcactatgcccagacaatgtgaaacatcagagatgaagtgctcttcccacagaggtggactgatccttctccccactcccttggtgtgtctctgaatgcaatgttgtcttggaaaacagctttccaagcatttcactcctgagcacttgccagtttcctcacttgttcttcacatatccaggcaaagacatcctgtttgctatatgaagcattgtatcccgtataaaaggaaggaaagagagaaatatatttttacactcatcactcctcaggggctgtacaatcatgtagaaattgtttaatgtgcctgtcaaatagccaaagagtgttaaaccctgagttcccacccatgtgtgtggtatggttaggattcatccagatacacagagagaggcacaacaggaggagaaaggataggggtgtggggacagcgggcccccaatatggtgtaatcgtggcaggtctctgcctgaagtgctatgtggggtttttcttgttttaattttgactttaacccctgatttgtaagtttttcataaaataaacagaatcataactcatgtagatggctataagtgccgtagtgttctgtgggtctctggtgtctgccagtgataagtgtggcaccccaggaaggctgtggaccccatcaaggtgctatgtgagggccatgcttggggtggtggtgggcccagtagaccctgcagccatccatccagcctgcccactcacactgcccttgtgtactcctgctttgctacgttatcattgatcaatgtccctggttacctatgtgtttgaattatcttcgtgttacaggtgtttaatgattttgctccttctagcttatttgtatttcacctgtttttctttaaatcaacatggttacactctgtttcagcaactgtataaattaaacacaaattattactactgctaaaaaaaaaaaaaaaaaa

SEQ ID NO: 126 - DNA, 1794 bp, Homo sapiens
atttctttataaaccacaactctgggcccgcaatggcagtccactgccttgctgcagtcacagaatggaaatctgcagaggcctccgcagtcacctaatcactctcctcctcttcctgttccattcagagacgatctgccgaccctctgggagaaaatccagcaagatgcaagccttcagaatctgggatgttaaccagaagaccttctatctgaggaacaaccaactagttgctggatacttgcaaggaccaaatgtcaatttagaagaaaagatagatgtggtacccattgagcctcatgctctgttcttgggaatccatggagggaagatgtgcctgtcctgtgtcaagtctggtgatgagaccagactccagctggaggcagttaacatcactgacctgagcgagaacagaaagcaggacaagcgcttcgccttcatccgctcagacagtggccccaccaccagttttgagtctgccgcctgccccggttggttcctctgcacagcgatggaagctgaccagcccgtcagcctcaccaatatgcctgacgaaggcgtcatggtcaccaaattctacttccaggaggacgagtagtactgcccaggcctgcctgttcccattcttgcatggcaaggactgcagggactgccagtccccctgccccagggctcccggctatgggggcactgaggaccagccattgaggggtggaccctcagaaggcgtcacaacaacctggtcacaggactctgcctcctcttcaactgaccagcctccatgctgcctccagaatggtctttctaatgtgtgaatcagagcacagcagcccctgcacaaagcccttccatgtcgcctctgcattcaggatcaaaccccgaccacctgcccaacctgctctcctcttgccactgcctcttcctccctcattccaccttcccatgccctggatccatcaggccacttgatgacccccaaccaagtggctcccacaccctgttttacaaaaaagaaaagaccagtccatgagggaggtttttaagggtttgtggaaaatgaaaattaggatttcatgatttttttttttcagtccccgtgaaggagagcccttcatttggagattatgttctttcggggagaggctgaggacttaaaatattcctgcatttgtgaaatgatggtgaaagtaagtggtagcttttcccttctttttcttctttttttgtgatgtcccaacttgtaaaaattaaaagttatggtactatgttagccccataattttttttttccttttaaaacacttccataatctggactcctctgtccaggcactgctgcccagcctccaagctccatctccactccagattttttacagctgcctgcagtactttacctcctatcagaagtttctcagctcccaaggctctgagcaaatgtggctcctgggggttctttcttcctctgctgaaggaataaattgctccttgacattgtagagcttctggcacttggagacttgtatgaaagatggctgtgcctctgcctgtctcccccaccgggctgggagctctgcagagcaggaaacatgactcgtatatgtctcaggtccctgcagggccaagcacctagcctcgctcttggcaggtactcagcgaatgaatgctgtatatgttgggtgcaaagttccctacttcctgtgacttcagctctgttttacaataaaatcttgaaaatgcctaaaaaaaaaaaaaaaaaaaaaaaaaaaaaaaaaaaaaaaaaaaaaaaaaaaa

SEQ ID NO: 127 - DNA, 1865 bp, Homo sapiens
gggcagctccaccctgggagggactgtggcccaggtactgcccgggtgctactttatgggcagcagctcagttgagttagagtctggaagacctcagaagacctcctgtcctatgaggccctccccatggctttagctgacttgtatgaagaaggaggtggaggaggaggagaaggtgaagacaatgctgactcaaaggagacgatctgccgaccctctgggagaaaatccagcaagatgcaagccttcagaatctgggatgttaaccagaagaccttctatctgaggaacaaccaactagttgctggatacttgcaaggaccaaatgtcaatttagaagaaaagatagatgtggtacccattgagcctcatgctctgttcttgggaatccatggagggaagatgtgcctgtcctgtgtcaagtctggtgatgagaccagactccagctggaggcagttaacatcactgacctgagcgagaacagaaagcaggacaagcgcttcgccttcatccgctcagacagtggccccaccaccagttttgagtctgccgcctgccccggttggttcctctgcacagcgatggaagctgaccagcccgtcagcctcaccaatatgcctgacgaaggcgtcatggtcaccaaattctacttccaggaggacgagtagtactgcccaggcctgcctgttcccattcttgcatggcaaggactgcagggactgccagtccccctgccccagggctcccggctatgggggcactgaggaccagccattgaggggtggaccctcagaaggcgtcacaacaacctggtcacaggactctgcctcctcttcaactgaccagcctccatgctgcctccagaatggtctttctaatgtgtgaatcagagcacagcagcccctgcacaaagcccttccatgtcgcctctgcattcaggatcaaaccccgaccacctgcccaacctgctctcctcttgccactgcctcttcctccctcattccaccttcccatgccctggatccatcaggccacttgatgacccccaaccaagtggctcccacaccctgttttacaaaaaagaaaagaccagtccatgagggaggtttttaagggtttgtggaaaatgaaaattaggatttcatgatttttttttttcagtccccgtgaaggagagcccttcatttggagattatgttctttcggggagaggctgaggacttaaaatattcctgcatttgtgaaatgatggtgaaagtaagtggtagcttttcccttctttttcttctttttttgtgatgtcccaacttgtaaaaattaaaagttatggtactatgttagccccataattttttttttccttttaaaacacttccataatctggactcctctgtccaggcactgctgcccagcctccaagctccatctccactccagattttttacagctgcctgcagtactttacctcctatcagaagtttctcagctcccaaggctctgagcaaatgtggctcctgggggttctttcttcctctgctgaaggaataaattgctccttgacattgtagagcttctggcacttggagacttgtatgaaagatggctgtgcctctgcctgtctcccccaccgggctgggagctctgcagagcaggaaacatgactcgtatatgtctcaggtccctgcagggccaagcacctagcctcgctcttggcaggtactcagcgaatgaatgctgtatatgttgggtgcaaagttccctacttcctgtgacttcagctctgttttacaataaaatcttgaaaatgcctaaaaaaaaaaaaaaaaaaaaaaaaaaaaaaaaaaaaaaaaaaaaaaaaaaaa

SEQ ID NO: 128 - DNA, 1802 bp, Homo sapiens
gggcagctccaccctgggagggactgtggcccaggtactgcccgggtgctactttatgggcagcagctcagttgagttagagtctggaagacctcagaagacctcctgtcctatgaggccctccccatggctttagagacgatctgccgaccctctgggagaaaatccagcaagatgcaagccttcagaatctgggatgttaaccagaagaccttctatctgaggaacaaccaactagttgctggatacttgcaaggaccaaatgtcaatttagaagaaaagatagatgtggtacccattgagcctcatgctctgttcttgggaatccatggagggaagatgtgcctgtcctgtgtcaagtctggtgatgagaccagactccagctggaggcagttaacatcactgacctgagcgagaacagaaagcaggacaagcgcttcgccttcatccgctcagacagtggccccaccaccagttttgagtctgccgcctgccccggttggttcctctgcacagcgatggaagctgaccagcccgtcagcctcaccaatatgcctgacgaaggcgtcatggtcaccaaattctacttccaggaggacgagtagtactgcccaggcctgcctgttcccattcttgcatggcaaggactgcagggactgccagtccccctgccccagggctcccggctatgggggcactgaggaccagccattgaggggtggaccctcagaaggcgtcacaacaacctggtcacaggactctgcctcctcttcaactgaccagcctccatgctgcctccagaatggtctttctaatgtgtgaatcagagcacagcagcccctgcacaaagcccttccatgtcgcctctgcattcaggatcaaaccccgaccacctgcccaacctgctctcctcttgccactgcctcttcctccctcattccaccttcccatgccctggatccatcaggccacttgatgacccccaaccaagtggctcccacaccctgttttacaaaaaagaaaagaccagtccatgagggaggtttttaagggtttgtggaaaatgaaaattaggatttcatgatttttttttttcagtccccgtgaaggagagcccttcatttggagattatgttctttcggggagaggctgaggacttaaaatattcctgcatttgtgaaatgatggtgaaagtaagtggtagcttttcccttctttttcttctttttttgtgatgtcccaacttgtaaaaattaaaagttatggtactatgttagccccataattttttttttccttttaaaacacttccataatctggactcctctgtccaggcactgctgcccagcctccaagctccatctccactccagattttttacagctgcctgcagtactttacctcctatcagaagtttctcagctcccaaggctctgagcaaatgtggctcctgggggttctttcttcctctgctgaaggaataaattgctccttgacattgtagagcttctggcacttggagacttgtatgaaagatggctgtgcctctgcctgtctcccccaccgggctgggagctctgcagagcaggaaacatgactcgtatatgtctcaggtccctgcagggccaagcacctagcctcgctcttggcaggtactcagcgaatgaatgctgtatatgttgggtgcaaagttccctacttcctgtgacttcagctctgttttacaataaaatcttgaaaatgcctaaaaaaaaaaaaaaaaaaaaaaaaaaaaaaaaaaaaaaaaaaaaaaaaaaaa

SEQ ID NO: 129 - DNA, 1973 bp, Homo sapiens
gggcagctccaccctgggagggactgtggcccaggtactgcccgggtgctactttatgggcagcagctcagttgagttagagtctggaagacctcagaagacctcctgtcctatgaggccctccccatggctttagggggattataaaactaatcatcaaagccaagaaggcaagagcaagcatgtaccgctgaaaacacaagataactgcataagtaatgactttcagtgcagattcatagctaacccataaactgctggggcaaaaatcatcttggaaggctctgaacctcagaaaggattcacaagacgatctgccgaccctctgggagaaaatccagcaagatgcaagccttcagaatctgggatgttaaccagaagaccttctatctgaggaacaaccaactagttgctggatacttgcaaggaccaaatgtcaatttagaagaaaagatagatgtggtacccattgagcctcatgctctgttcttgggaatccatggagggaagatgtgcctgtcctgtgtcaagtctggtgatgagaccagactccagctggaggcagttaacatcactgacctgagcgagaacagaaagcaggacaagcgcttcgccttcatccgctcagacagtggccccaccaccagttttgagtctgccgcctgccccggttggttcctctgcacagcgatggaagctgaccagcccgtcagcctcaccaatatgcctgacgaaggcgtcatggtcaccaaattctacttccaggaggacgagtagtactgcccaggcctgcctgttcccattcttgcatggcaaggactgcagggactgccagtccccctgccccagggctcccggctatgggggcactgaggaccagccattgaggggtggaccctcagaaggcgtcacaacaacctggtcacaggactctgcctcctcttcaactgaccagcctccatgctgcctccagaatggtctttctaatgtgtgaatcagagcacagcagcccctgcacaaagcccttccatgtcgcctctgcattcaggatcaaaccccgaccacctgcccaacctgctctcctcttgccactgcctcttcctccctcattccaccttcccatgccctggatccatcaggccacttgatgacccccaaccaagtggctcccacaccctgttttacaaaaaagaaaagaccagtccatgagggaggtttttaagggtttgtggaaaatgaaaattaggatttcatgatttttttttttcagtccccgtgaaggagagcccttcatttggagattatgttctttcggggagaggctgaggacttaaaatattcctgcatttgtgaaatgatggtgaaagtaagtggtagcttttcccttctttttcttctttttttgtgatgtcccaacttgtaaaaattaaaagttatggtactatgttagccccataattttttttttccttttaaaacacttccataatctggactcctctgtccaggcactgctgcccagcctccaagctccatctccactccagattttttacagctgcctgcagtactttacctcctatcagaagtttctcagctcccaaggctctgagcaaatgtggctcctgggggttctttcttcctctgctgaaggaataaattgctccttgacattgtagagcttctggcacttggagacttgtatgaaagatggctgtgcctctgcctgtctcccccaccgggctgggagctctgcagagcaggaaacatgactcgtatatgtctcaggtccctgcagggccaagcacctagcctcgctcttggcaggtactcagcgaatgaatgctgtatatgttgggtgcaaagttccctacttcctgtgacttcagctctgttttacaataaaatcttgaaaatgcctaaaaaaaaaaaaaaaaaaaaaaaaaaaaaaaaaaaaaaaaaaaaaaaaaaaa

SEQ ID NO: 130 - DNA, 2717 bp, Homo sapiens
cgctgggaatcctgctcctcctcaggtcctggcagtttcagggcccctccctaggccttacttaaaaggctgaggcatccttggaggaacaggcagactccacagctcccgccaggagaaaggaacattctgaggggagtctacaccctgtggagctcaagatggtcctgagtggggcgctgtgcttccgaatgaaggactcggcattgaaggtgctttatctgcataataaccagcttctagctggagggctgcatgcagggaaggtcattaaaggtgaagagatcagcgtggtccccaatcggtggctggatgccagcctgtcccccgtcatcctgggtgtccagggtggaagccagtgcctgtcatgtggggtggggcaggagccgactctaacactagagccagtgaacatcatggagctctatcttggtgccaaggaatccaagagcttcaccttctaccggcgggacatggggctcacctccagcttcgagtcggctgcctacccgggctggttcctgtgcacggtgcctgaagccgatcagcctgtcagactcacccagcttcccgagaatggtggctggaatgcccccatcacagacttctacttccagcagtgtgactagggcaacgtgccccccagaactccctgggcagagccagctcgggtgaggggtgagtggaggagacccatggcggacaatcactctctctgctctcaggacccccacgtctgacttagtgggcacctgaccactttgtcttctggttcccagtttggataaattctgagatttggagctcagtccacggtcctcccccactggatggtgctactgctgtggaatcttgtaaaaaccatgtggggtaaactgggaataacatgaaaagatttctgtggaggtggggtgggggagtggtgggaatcattcctgcttaatggtaactgaccagtgttaccctgagccccgcaggccaacccatccccagttgagccttatagggtcagtagctctccacatgaagacctgtcactcaccactatgcaggagagggaggtggtcatagagtcagggatctatggcccttggcccagccccacctccttccctttaatcctgccactgtcatatgctacctttcctatctcttccctcatcatcttgttgtgggcatgaggaggtgctgatgtcagaagaaatggctcgagctcagaagataaaagataagtagggtatgctgatcctcttttaaaaacccaagatacaatcaaaatcccagatgctggtctctattcccatgaaaaagtgctcatgacatattgagaagacctacttacaaagtggcatatattgcaatttattttaattaaaagatacctatttatatatttctttatagaaaaaagtctggaagagtttacttcaattgtagcaatgtcagggtggtggcagtataggtgatttttcttttaattctgttaatttacctgtatttcctaatttttctacaatgaagatgaattccttgtataaaaataagaaaagaaattaatcttgaggtaagcagagtagacatcatctctgattgtcctcagcctccacttccccagagtaaattcaaattgaatcgagctctgctgctctggttggttgtagtagtgatcaggaaacagatctcagcaaagccactgaggaggaggctgtgctgagtttgtgtggctggaatctctgggtaaggaacttaaagaacaaaaatcatctggtaattctttcctagaaggatcacagcccctgggattccaaggcattggatccagtctctaagaaggctgctgtactggttgaattgtgtccccctcaaattcacatccttcttggaatctcagtctgtgagtttatttggagataaggtctctgcagatgtagttagttaagacaaggtcatgctggatgaaggtagacctaaattcaatatgactggtttccttgtatgaaaaggagaggacacagagacagaggagatgcggggaagactatgtaaagatgaaggcagagatcggagttttgcagccacaagctaagaaacaccaaggattgtggcaaccatcagaagcttggaagaggcaaagaagaattcttccctagaggctttagagggataacggctctgctgaaaccttaatctcagacttccagcctcctgaacgaagaaagaataaatttcggctgttttaagccaccaaggataattggttacagcagctctaggaaactaatacagctgctaaaatgatccctgtctcctcgtgtttacattctgtgtgtgtcccctcccacaatgtaccaaagttgtctttgtgaccaatagaatatggcagaagtgatggcatgccacttccaagattaggttataaaagacactgcagcttctacttgagccctctctctctgccacccaccgcccccaatctatcttggctcactcgctctgggggaagctagctgccatgctatgagcaggcctataaagagacttacgtggtaaaaaatgaagtctcctgcccacagccacattagtgaacctagaagcagagactctgtgagataatcgatgtttgttgttttaagttgctcagttttggtctaacttgttatgcagcaatagataaataatatgcagagaaagagaaaaaaaaaaaaaaaaaaaaaaaa

SEQ ID NO: 131 - DNA, 2689 bp, Homo sapiens
ggagagtcccacctctaacatctcctgtaggcctggcaatggcaggcaggaaagacagaggaaggaaggagggagaagggaaggagtgaaggaaggagtgaaaaaggggagtctacaccctgtggagctcaagatggtcctgagtggggcgctgtgcttccgaatgaaggactcggcattgaaggtgctttatctgcataataaccagcttctagctggagggctgcatgcagggaaggtcattaaaggtgaagagatcagcgtggtccccaatcggtggctggatgccagcctgtcccccgtcatcctgggtgtccagggtggaagccagtgcctgtcatgtggggtggggcaggagccgactctaacactagagccagtgaacatcatggagctctatcttggtgccaaggaatccaagagcttcaccttctaccggcgggacatggggctcacctccagcttcgagtcggctgcctacccgggctggttcctgtgcacggtgcctgaagccgatcagcctgtcagactcacccagcttcccgagaatggtggctggaatgcccccatcacagacttctacttccagcagtgtgactagggcaacgtgccccccagaactccctgggcagagccagctcgggtgaggggtgagtggaggagacccatggcggacaatcactctctctgctctcaggacccccacgtctgacttagtgggcacctgaccactttgtcttctggttcccagtttggataaattctgagatttggagctcagtccacggtcctcccccactggatggtgctactgctgtggaatcttgtaaaaaccatgtggggtaaactgggaataacatgaaaagatttctgtggaggtggggtgggggagtggtgggaatcattcctgcttaatggtaactgaccagtgttaccctgagccccgcaggccaacccatccccagttgagccttatagggtcagtagctctccacatgaagacctgtcactcaccactatgcaggagagggaggtggtcatagagtcagggatctatggcccttggcccagccccacctccttccctttaatcctgccactgtcatatgctacctttcctatctcttccctcatcatcttgttgtgggcatgaggaggtgctgatgtcagaagaaatggctcgagctcagaagataaaagataagtagggtatgctgatcctcttttaaaaacccaagatacaatcaaaatcccagatgctggtctctattcccatgaaaaagtgctcatgacatattgagaagacctacttacaaagtggcatatattgcaatttattttaattaaaagatacctatttatatatttctttatagaaaaaagtctggaagagtttacttcaattgtagcaatgtcagggtggtggcagtataggtgatttttcttttaattctgttaatttacctgtatttcctaatttttctacaatgaagatgaattccttgtataaaaataagaaaagaaattaatcttgaggtaagcagagtagacatcatctctgattgtcctcagcctccacttccccagagtaaattcaaattgaatcgagctctgctgctctggttggttgtagtagtgatcaggaaacagatctcagcaaagccactgaggaggaggctgtgctgagtttgtgtggctggaatctctgggtaaggaacttaaagaacaaaaatcatctggtaattctttcctagaaggatcacagcccctgggattccaaggcattggatccagtctctaagaaggctgctgtactggttgaattgtgtccccctcaaattcacatccttcttggaatctcagtctgtgagtttatttggagataaggtctctgcagatgtagttagttaagacaaggtcatgctggatgaaggtagacctaaattcaatatgactggtttccttgtatgaaaaggagaggacacagagacagaggagatgcggggaagactatgtaaagatgaaggcagagatcggagttttgcagccacaagctaagaaacaccaaggattgtggcaaccatcagaagcttggaagaggcaaagaagaattcttccctagaggctttagagggataacggctctgctgaaaccttaatctcagacttccagcctcctgaacgaagaaagaataaatttcggctgttttaagccaccaaggataattggttacagcagctctaggaaactaatacagctgctaaaatgatccctgtctcctcgtgtttacattctgtgtgtgtcccctcccacaatgtaccaaagttgtctttgtgaccaatagaatatggcagaagtgatggcatgccacttccaagattaggttataaaagacactgcagcttctacttgagccctctctctctgccacccaccgcccccaatctatcttggctcactcgctctgggggaagctagctgccatgctatgagcaggcctataaagagacttacgtggtaaaaaatgaagtctcctgcccacagccacattagtgaacctagaagcagagactctgtgagataatcgatgtttgttgttttaagttgctcagttttggtctaacttgttatgcagcaatagataaataatatgcagagaaagagaaaaaaaaaaaaaaaaaaaaaaaa

SEQ ID NO: 132 - DNA, 1282 bp, Homo sapiens
aagccacccagcctatgcatccgctcctcaatcctctcctgttggcactgggcctcatggcgcttttgttgaccacggtcattgctctcacttgccttggcggctttgcctccccaggccctgtgcctccctctacagccctcagggagctcattgaggagctggtcaacatcacccagaaccagaaggctccgctctgcaatggcagcatggtatggagcatcaacctgacagctggcatgtactgtgcagccctggaatccctgatcaacgtgtcaggctgcagtgccatcgagaagacccagaggatgctgagcggattctgcccgcacaaggtctcagctgggcagttttccagcttgcatgtccgagacaccaaaatcgaggtggcccagtttgtaaaggacctgctcttacatttaaagaaactttttcgcgagggacagttcaactgaaacttcgaaagcatcattatttgcagagacaggacctgactattgaagttgcagattcatttttctttctgatgtcaaaaatgtcttgggtaggcgggaaggagggttagggaggggtaaaattccttagcttagacctcagcctgtgctgcccgtcttcagcctagccgacctcagccttccccttgcccagggctcagcctggtgggcctcctctgtccagggccctgagctcggtggacccagggatgacatgtccctacacccctcccctgccctagagcacactgtagcattacagtgggtgccccccttgccagacatgtggtgggacagggacccacttcacacacaggcaactgaggcagacagcagctcaggcacacttcttcttggtcttatttattattgtgtgttatttaaatgagtgtgtttgtcaccgttggggattggggaagactgtggctgctagcacttggagccaagggttcagagactcagggccccagcactaaagcagtggacaccaggagtccctggtaataagtactgtgtacagaattctgctacctcactggggtcctggggcctcggagcctcatccgaggcagggtcaggagaggggcagaacagccgctcctgtctgccagccagcagccagctctcagccaacgagtaatttattgtttttccttgtatttaaatattaaatatgttagcaaagagttaatatatagaagggtaccttgaacactgggggaggggacattgaacaagttgtttcattgactatcaaactgaagccagaaataaagttggtgacagat

SEQ ID NO: 133 - DNA, 4006 bp, Homo sapiens
tgccaaggctccagcccggccgggctccgaggcgagaggctgcatggagtggccggcgcggctctgcgggctgtgggcgctgctgctctgcgccggcggcgggggcgggggcgggggcgccgcgcctacggaaactcagccacctgtgacaaatttgagtgtctctgttgaaaacctctgcacagtaatatggacatggaatccacccgagggagccagctcaaattgtagtctatggtattttagtcattttggcgacaaacaagataagaaaatagctccggaaactcgtcgttcaatagaagtacccctgaatgagaggatttgtctgcaagtggggtcccagtgtagcaccaatgagagtgagaagcctagcattttggttgaaaaatgcatctcacccccagaaggtgatcctgagtctgctgtgactgagcttcaatgcatttggcacaacctgagctacatgaagtgttcttggctccctggaaggaataccagtcccgacactaactatactctctactattggcacagaagcctggaaaaaattcatcaatgtgaaaacatctttagagaaggccaatactttggttgttcctttgatctgaccaaagtgaaggattccagttttgaacaacacagtgtccaaataatggtcaaggataatgcaggaaaaattaaaccatccttcaatatagtgcctttaacttcccgtgtgaaacctgatcctccacatattaaaaacctctccttccacaatgatgacctatatgtgcaatgggagaatccacagaattttattagcagatgcctattttatgaagtagaagtcaataacagccaaactgagacacataatgttttctacgtccaagaggctaaatgtgagaatccagaatttgagagaaatgtggagaatacatcttgtttcatggtccctggtgttcttcctgatactttgaacacagtcagaataagagtcaaaacaaataagttatgctatgaggatgacaaactctggagtaattggagccaagaaatgagtataggtaagaagcgcaattccacactctacataaccatgttactcattgttccagtcatcgtcgcaggtgcaatcatagtactcctgctttacctaaaaaggctcaagattattatattccctccaattcctgatcctggcaagatttttaaagaaatgtttggagaccagaatgatgatactctgcactggaagaagtacgacatctatgagaagcaaaccaaggaggaaaccgactctgtagtgctgatagaaaacctgaagaaagcctctcagtgatggagataatttatttttaccttcactgtgaccttgagaagattcttcccattctccatttgttatctgggaacttattaaatggaaactgaaactactgcaccatttaaaaacaggcagctcataagagccacaggtctttatgttgagtcgcgcaccgaaaaactaaaaataatgggcgctttggagaagagtgtggagtcattctcattgaattataaaagccagcaggcttcaaactaggggacaaagcaaaaagtgatgatagtggtggagttaatcttatcaagagttgtgacaacttcctgagggatctatacttgctttgtgttctttgtgtcaacatgaacaaattttatttgtaggggaactcatttggggtgcaaatgctaatgtcaaacttgagtcacaaagaacatgtagaaaacaaaatggataaaatctgatatgtattgtttgggatcctattgaaccatgtttgtggctattaaaactcttttaacagtctgggctgggtccggtggctcacgcctgtaatcccagcaatttgggagtccgaggcgggcggatcactcgaggtcaggagttccagaccagcctgaccaaaatggtgaaacctcctctctactaaaactacaaaaattaactgggtgtggtggcgcgtgcctgtaatcccagctactcgggaagctgaggcaggtgaattgtttgaacctgggaggtggaggttgcagtgagcagagatcacaccactgcactctagcctgggtgacagagcaagactctgtctaaaaaacaaaacaaaacaaaacaaaacaaaaaaacctcttaatattctggagtcatcattcccttcgacagcattttcctctgctttgaaagccccagaaatcagtgttggccatgatgacaactacagaaaaaccagaggcagcttctttgccaagacctttcaaagccattttaggctgttaggggcagtggaggtagaatgactccttgggtattagagtttcaaccatgaagtctctaacaatgtattttcttcacctctgctactcaagtagcatttactgtgtctttggtttgtgctaggcccccgggtgtgaagcacagaccccttccaggggtttacagtctatttgagactcctcagttcttgccacttttttttttaatctccaccagtcatttttcagaccttttaactcctcaattccaacactgatttccccttttgcattctccctccttcccttccttgtagccttttgactttcattggaaattaggatgtaaatctgctcaggagacctggaggagcagaggataattagcatctcaggttaagtgtgagtaatctgagaaacaatgactaattcttgcatattttgtaacttccatgtgagggttttcagcattgatatttgtgcattttctaaacagagatgaggtggtatcttcacgtagaacattggtattcgcttgagaaaaaaagaatagttgaacctatttctctttctttacaagatgggtccaggattcctcttttctctgccataaatgattaattaaatagcttttgtgtcttacattggtagccagccagccaaggctctgtttatgcttttggggggcatatattgggttccattctcacctatccacacaacatatccgtatatatcccctctactcttacttcccccaaatttaaagaagtatgggaaatgagaggcatttcccccaccccatttctctcctcacacacagactcatattactggtaggaacttgagaactttatttccaagttgttcaaacatttaccaatcatattaatacaatgatgctatttgcaattcctgctcctaggggaggggagataagaaaccctcactctctacaggtttgggtacaagtggcaacctgcttccatggccgtgtagaagcatggtgccctggcttctctgaggaagctggggttcatgacaatggcagatgtaaagttattcttgaagtcagattgaggctgggagacagccgtagtagatgttctactttgttctgctgttctctagaaagaatatttggttttcctgtataggaatgagattaattcctttccaggtattttataattctgggaagcaaaacccatgcctccccctagccatttttactgttatcctatttagatggccatgaagaggatgctgtgaaattcccaacaaacattgatgctgacagtcatgcagtctgggagtggggaagtgatcttttgttcccatcctcttcttttagcagtaaaatagctgagggaaaagggagggaaaaggaagttatgggaatacctgtggtggttgtgatccctaggtcttgggagctcttggaggtgtctgtatcagtggatttcccatcccctgtgggaaattagtaggctcatttactgttttaggtctagcctatgtggattttttcctaacatacctaagcaaacccagtgtcaggatggtaattcttattctttcgttcagttaagtttttcccttcatctgggcactgaagggatatgtgaaacaatgttaacatttttggtagtcttcaaccagggattgtttctgtttaacttcttataggaaagcttgagtaaaataaatattgtctttttgtatgtca

SEQ ID NO: 134 - DNA, 1376 bp, Homo sapiens
gtaagaacactctcgtgagtctaacggtcttccggatgaaggctatttgaagtcgccataacctggtcagaagtgtgcctgtcggcggggagagaggcaatatcaaggttttaaatctcggagaaatggctttcgtttgcttggctatcggatgcttatatacctttctgataagcacaacatttggctgtacttcatcttcagacaccgagataaaagttaaccctcctcaggattttgagatagtggatcccggatacttaggttatctctatttgcaatggcaacccccactgtctctggatcattttaaggaatgcacagtggaatatgaactaaaataccgaaacattggtagtgaaacatggaagaccatcattactaagaatctacattacaaagatgggtttgatcttaacaagggcattgaagcgaagatacacacgcttttaccatggcaatgcacaaatggatcagaagttcaaagttcctgggcagaaactacttattggatatcaccacaaggaattccagaaactaaagttcaggatatggattgcgtatattacaattggcaatatttactctgttcttggaaacctggcataggtgtacttcttgataccaattacaacttgttttactggtatgagggcttggatcatgcattacagtgtgttgattacatcaaggctgatggacaaaatataggatgcagatttccctatttggaggcatcagactataaagatttctatatttgtgttaatggatcatcagagaacaagcctatcagatccagttatttcacttttcagcttcaaaatatagttaaacctttgccgccagtctatcttacttttactcgggagagttcatgtgaaattaagctgaaatggagcatacctttgggacctattccagcaaggtgttttgattatgaaattgagatcagagaagatgatactaccttggtgactgctacagttgaaaatgaaacatacaccttgaaaacaacaaatgaaacccgacaattatgctttgtagtaagaagcaaagtgaatatttattgctcagatgacggaatttggagtgagtggagtgataaacaatgctgggaaggtgaagacctatcgaagaaaactttgctacgtttctggctaccatttggtttcatcttaatattagttatatttgtaaccggtctgcttttgcgtaagccaaacacctacccaaaaatgattccagaatttttctgtgatacatgaagactttccatatcaagagacatggtattgactcaacagtttccagtcatggccaaatgttcaatatgagtctcaataaactgaatttttcttgcgaatgttgaaaaa

SEQ ID NO: 135 - DNA, 3710 bp, Homo sapiens
gggtctccgcgcccaggaaagccccgcgcggcgcgggccagggaagggccacccaggggtcccccacttcccgcttgggcgcccggacggcgaatggagcaggggcgcgcagataattaaagatttacacacagctggaagaaatcatagagaagccgggcgtggtggctcatgcctataatcccagcacttttggaggctgaggcgggcagatcacttgagatcaggagttcgagaccagcctggtgccttggcatctcccaatggggtggctttgctctgggctcctgttccctgtgagctgcctggtcctgctgcaggtggcaagctctgggaacatgaaggtcttgcaggagcccacctgcgtctccgactacatgagcatctctacttgcgagtggaagatgaatggtcccaccaattgcagcaccgagctccgcctgttgtaccagctggtttttctgctctccgaagcccacacgtgtatccctgagaacaacggaggcgcggggtgcgtgtgccacctgctcatggatgacgtggtcagtgcggataactatacactggacctgtgggctgggcagcagctgctgtggaagggctccttcaagcccagcgagcatgtgaaacccagggccccaggaaacctgacagttcacaccaatgtctccgacactctgctgctgacctggagcaacccgtatccccctgacaattacctgtataatcatctcacctatgcagtcaacatttggagtgaaaacgacccggcagatttcagaatctataacgtgacctacctagaaccctccctccgcatcgcagccagcaccctgaagtctgggatttcctacagggcacgggtgagggcctgggctcagtgctataacaccacctggagtgagtggagccccagcaccaagtggcacaactcctacagggagcccttcgagcagcacctcctgctgggcgtcagcgtttcctgcattgtcatcctggccgtctgcctgttgtgctatgtcagcatcaccaagattaagaaagaatggtgggatcagattcccaacccagcccgcagccgcctcgtggctataataatccaggatgctcaggggtcacagtgggagaagcggtcccgaggccaggaaccagccaagtgcccacactggaagaattgtcttaccaagctcttgccctgttttctggagcacaacatgaaaagggatgaagatcctcacaaggctgccaaagagatgcctttccagggctctggaaaatcagcatggtgcccagtggagatcagcaagacagtcctctggccagagagcatcagcgtggtgcgatgtgtggagttgtttgaggccccggtggagtgtgaggaggaggaggaggtagaggaagaaaaagggagcttctgtgcatcgcctgagagcagcagggatgacttccaggagggaagggagggcattgtggcccggctaacagagagcctgttcctggacctgctcggagaggagaatgggggcttttgccagcaggacatgggggagtcatgccttcttccaccttcgggaagtacgagtgctcacatgccctgggatgagttcccaagtgcagggcccaaggaggcacctccctggggcaaggagcagcctctccacctggagccaagtcctcctgccagcccgacccagagtccagacaacctgacttgcacagagacgcccctcgtcatcgcaggcaaccctgcttaccgcagcttcagcaactccctgagccagtcaccgtgtcccagagagctgggtccagacccactgctggccagacacctggaggaagtagaacccgagatgccctgtgtcccccagctctctgagccaaccactgtgccccaacctgagccagaaacctgggagcagatcctccgccgaaatgtcctccagcatggggcagctgcagcccccgtctcggcccccaccagtggctatcaggagtttgtacatgcggtggagcagggtggcacccaggccagtgcggtggtgggcttgggtcccccaggagaggctggttacaaggccttctcaagcctgcttgccagcagtgctgtgtccccagagaaatgtgggtttggggctagcagtggggaagaggggtataagcctttccaagacctcattcctggctgccctggggaccctgccccagtccctgtccccttgttcacctttggactggacagggagccacctcgcagtccgcagagctcacatctcccaagcagctccccagagcacctgggtctggagccgggggaaaaggtagaggacatgccaaagcccccacttccccaggagcaggccacagacccccttgtggacagcctgggcagtggcattgtctactcagcccttacctgccacctgtgcggccacctgaaacagtgtcatggccaggaggatggtggccagacccctgtcatggccagtccttgctgtggctgctgctgtggagacaggtcctcgccccctacaacccccctgagggccccagacccctctccaggtggggttccactggaggccagtctgtgtccggcctccctggcaccctcgggcatctcagagaagagtaaatcctcatcatccttccatcctgcccctggcaatgctcagagctcaagccagacccccaaaatcgtgaactttgtctccgtgggacccacatacatgagggtctcttaggtgcatgtcctcttgttgctgagtctgcagatgaggactagggcttatccatgcctgggaaatgccacctcctggaaggcagccaggctggcagatttccaaaagacttgaagaaccatggtatgaaggtgattggccccactgacgttggcctaacactgggctgcagagactggaccccgcccagcattgggctgggctcgccacatcccatgagagtagagggcactgggtcgccgtgccccacggcaggcccctgcaggaaaactgaggcccttgggcacctcgacttgtgaacgagttgttggctgctccctccacagcttctgcagcagactgtccctgttgtaactgcccaaggcatgttttgcccaccagatcatggcccacgtggaggcccacctgcctctgtctcactgaactagaagccgagcctagaaactaacacagccatcaagggaatgacttgggcggccttgggaaatcgatgagaaattgaacttcagggagggtggtcattgcctagaggtgctcattcatttaacagagcttccttaggttgatgctggaggcagaatcccggctgtcaaggggtgttcagttaaggggagcaacagaggacatgaaaaattgctatgactaaagcagggacaatttgctgccaaacacccatgcccagctgtatggctgggggctcctcgtatgcatggaacccccagaataaatatgctcagccaccctgtgggccgggcaatccagacagcaggcataaggcaccagttaccctgcatgttggcccagacctcaggtgctagggaaggcgggaaccttgggttgagtaatgctcgtctgtgtgttttagtttcatcacctgttatctgtgtttgctgaggagagtggaacagaaggggtggagttttgtataaataaagtttctttgtctctttaaaaaaaaaaaaaaaaaaaaaa

SEQ ID NO: 136 - DNA, 3577 bp, Homo sapiens
gggtctccgcgcccaggaaagccccgcgcggcgcgggccagggaagggccacccaggggtcccccacttcccgcttgggcgcccggacggcgaatggagcaggggcgcgcaggtgccttggcatctcccaatggggtggctttgctctgggctcctgttccctgtgagctgcctggtcctgctgcaggtggcaagctctgggaacatgaaggtcttgcaggagcccacctgcgtctccgactacatgagcatctctacttgcgagtggaagatgaatggtcccaccaattgcagcaccgagctccgcctgttgtaccagctggtttttctgctctccgaagcccacacgtgtatccctgagaacaacggaggcgcggggtgcgtgtgccacctgctcatggatgacgtggtcagtgcggataactatacactggacctgtgggctgggcagcagctgctgtggaagggctccttcaagcccagcgagcatgtgaaacccagggccccaggaaacctgacagttcacaccaatgtctccgacactctgctgctgacctggagcaacccgtatccccctgacaattacctgtataatcatctcacctatgcagtcaacatttggagtgaaaacgacccggcagatttcagaatctataacgtgacctacctagaaccctccctccgcatcgcagccagcaccctgaagtctgggatttcctacagggcacgggtgagggcctgggctcagtgctataacaccacctggagtgagtggagccccagcaccaagtggcacaactcctacagggagcccttcgagcagcacctcctgctgggcgtcagcgtttcctgcattgtcatcctggccgtctgcctgttgtgctatgtcagcatcaccaagattaagaaagaatggtgggatcagattcccaacccagcccgcagccgcctcgtggctataataatccaggatgctcaggggtcacagtgggagaagcggtcccgaggccaggaaccagccaagtgcccacactggaagaattgtcttaccaagctcttgccctgttttctggagcacaacatgaaaagggatgaagatcctcacaaggctgccaaagagatgcctttccagggctctggaaaatcagcatggtgcccagtggagatcagcaagacagtcctctggccagagagcatcagcgtggtgcgatgtgtggagttgtttgaggccccggtggagtgtgaggaggaggaggaggtagaggaagaaaaagggagcttctgtgcatcgcctgagagcagcagggatgacttccaggagggaagggagggcattgtggcccggctaacagagagcctgttcctggacctgctcggagaggagaatgggggcttttgccagcaggacatgggggagtcatgccttcttccaccttcgggaagtacgagtgctcacatgccctgggatgagttcccaagtgcagggcccaaggaggcacctccctggggcaaggagcagcctctccacctggagccaagtcctcctgccagcccgacccagagtccagacaacctgacttgcacagagacgcccctcgtcatcgcaggcaaccctgcttaccgcagcttcagcaactccctgagccagtcaccgtgtcccagagagctgggtccagacccactgctggccagacacctggaggaagtagaacccgagatgccctgtgtcccccagctctctgagccaaccactgtgccccaacctgagccagaaacctgggagcagatcctccgccgaaatgtcctccagcatggggcagctgcagcccccgtctcggcccccaccagtggctatcaggagtttgtacatgcggtggagcagggtggcacccaggccagtgcggtggtgggcttgggtcccccaggagaggctggttacaaggccttctcaagcctgcttgccagcagtgctgtgtccccagagaaatgtgggtttggggctagcagtggggaagaggggtataagcctttccaagacctcattcctggctgccctggggaccctgccccagtccctgtccccttgttcacctttggactggacagggagccacctcgcagtccgcagagctcacatctcccaagcagctccccagagcacctgggtctggagccgggggaaaaggtagaggacatgccaaagcccccacttccccaggagcaggccacagacccccttgtggacagcctgggcagtggcattgtctactcagcccttacctgccacctgtgcggccacctgaaacagtgtcatggccaggaggatggtggccagacccctgtcatggccagtccttgctgtggctgctgctgtggagacaggtcctcgccccctacaacccccctgagggccccagacccctctccaggtggggttccactggaggccagtctgtgtccggcctccctggcaccctcgggcatctcagagaagagtaaatcctcatcatccttccatcctgcccctggcaatgctcagagctcaagccagacccccaaaatcgtgaactttgtctccgtgggacccacatacatgagggtctcttaggtgcatgtcctcttgttgctgagtctgcagatgaggactagggcttatccatgcctgggaaatgccacctcctggaaggcagccaggctggcagatttccaaaagacttgaagaaccatggtatgaaggtgattggccccactgacgttggcctaacactgggctgcagagactggaccccgcccagcattgggctgggctcgccacatcccatgagagtagagggcactgggtcgccgtgccccacggcaggcccctgcaggaaaactgaggcccttgggcacctcgacttgtgaacgagttgttggctgctccctccacagcttctgcagcagactgtccctgttgtaactgcccaaggcatgttttgcccaccagatcatggcccacgtggaggcccacctgcctctgtctcactgaactagaagccgagcctagaaactaacacagccatcaagggaatgacttgggcggccttgggaaatcgatgagaaattgaacttcagggagggtggtcattgcctagaggtgctcattcatttaacagagcttccttaggttgatgctggaggcagaatcccggctgtcaaggggtgttcagttaaggggagcaacagaggacatgaaaaattgctatgactaaagcagggacaatttgctgccaaacacccatgcccagctgtatggctgggggctcctcgtatgcatggaacccccagaataaatatgctcagccaccctgtgggccgggcaatccagacagcaggcataaggcaccagttaccctgcatgttggcccagacctcaggtgctagggaaggcgggaaccttgggttgagtaatgctcgtctgtgtgttttagtttcatcacctgttatctgtgtttgctgaggagagtggaacagaaggggtggagttttgtataaataaagtttctttgtctctttaaaaaaaaaaaaaaaaaaaaaa

SEQ ID NO: 137 - DNA, 3821 bp, Homo sapiens
gggtctccgcgcccaggaaagccccgcgcggcgcgggccagggaagggccacccaggggtcccccacttcccgcttgggcgcccggacggcgaatggagcaggggcgcgcaggtgccttggcatctcccaatggggtggctttgctctgggctcctgttccctgtgagctgcctggtcctgctgcaggtggcaagctctggactcttcaggatgccgtgtggagaaaggaagagggtggaagccaggaggtctggagggaggtctggagtggaggagatgagaggctccggatccctctgggaggtagatttgaggacagattggaattgaggtgaaagacagagaaagagaagtggccaggatgactccaagatttctgacctaaactactgggaaggacgcggttgtcatttctgaaatgcagaaggatgccagaagagaagggaacatgaaggtcttgcaggagcccacctgcgtctccgactacatgagcatctctacttgcgagtggaagatgaatggtcccaccaattgcagcaccgagctccgcctgttgtaccagctggtttttctgctctccgaagcccacacgtgtatccctgagaacaacggaggcgcggggtgcgtgtgccacctgctcatggatgacgtggtcagtgcggataactatacactggacctgtgggctgggcagcagctgctgtggaagggctccttcaagcccagcgagcatgtgaaacccagggccccaggaaacctgacagttcacaccaatgtctccgacactctgctgctgacctggagcaacccgtatccccctgacaattacctgtataatcatctcacctatgcagtcaacatttggagtgaaaacgacccggcagatttcagaatctataacgtgacctacctagaaccctccctccgcatcgcagccagcaccctgaagtctgggatttcctacagggcacgggtgagggcctgggctcagtgctataacaccacctggagtgagtggagccccagcaccaagtggcacaactcctacagggagcccttcgagcagcacctcctgctgggcgtcagcgtttcctgcattgtcatcctggccgtctgcctgttgtgctatgtcagcatcaccaagattaagaaagaatggtgggatcagattcccaacccagcccgcagccgcctcgtggctataataatccaggatgctcaggggtcacagtgggagaagcggtcccgaggccaggaaccagccaagtgcccacactggaagaattgtcttaccaagctcttgccctgttttctggagcacaacatgaaaagggatgaagatcctcacaaggctgccaaagagatgcctttccagggctctggaaaatcagcatggtgcccagtggagatcagcaagacagtcctctggccagagagcatcagcgtggtgcgatgtgtggagttgtttgaggccccggtggagtgtgaggaggaggaggaggtagaggaagaaaaagggagcttctgtgcatcgcctgagagcagcagggatgacttccaggagggaagggagggcattgtggcccggctaacagagagcctgttcctggacctgctcggagaggagaatgggggcttttgccagcaggacatgggggagtcatgccttcttccaccttcgggaagtacgagtgctcacatgccctgggatgagttcccaagtgcagggcccaaggaggcacctccctggggcaaggagcagcctctccacctggagccaagtcctcctgccagcccgacccagagtccagacaacctgacttgcacagagacgcccctcgtcatcgcaggcaaccctgcttaccgcagcttcagcaactccctgagccagtcaccgtgtcccagagagctgggtccagacccactgctggccagacacctggaggaagtagaacccgagatgccctgtgtcccccagctctctgagccaaccactgtgccccaacctgagccagaaacctgggagcagatcctccgccgaaatgtcctccagcatggggcagctgcagcccccgtctcggcccccaccagtggctatcaggagtttgtacatgcggtggagcagggtggcacccaggccagtgcggtggtgggcttgggtcccccaggagaggctggttacaaggccttctcaagcctgcttgccagcagtgctgtgtccccagagaaatgtgggtttggggctagcagtggggaagaggggtataagcctttccaagacctcattcctggctgccctggggaccctgccccagtccctgtccccttgttcacctttggactggacagggagccacctcgcagtccgcagagctcacatctcccaagcagctccccagagcacctgggtctggagccgggggaaaaggtagaggacatgccaaagcccccacttccccaggagcaggccacagacccccttgtggacagcctgggcagtggcattgtctactcagcccttacctgccacctgtgcggccacctgaaacagtgtcatggccaggaggatggtggccagacccctgtcatggccagtccttgctgtggctgctgctgtggagacaggtcctcgccccctacaacccccctgagggccccagacccctctccaggtggggttccactggaggccagtctgtgtccggcctccctggcaccctcgggcatctcagagaagagtaaatcctcatcatccttccatcctgcccctggcaatgctcagagctcaagccagacccccaaaatcgtgaactttgtctccgtgggacccacatacatgagggtctcttaggtgcatgtcctcttgttgctgagtctgcagatgaggactagggcttatccatgcctgggaaatgccacctcctggaaggcagccaggctggcagatttccaaaagacttgaagaaccatggtatgaaggtgattggccccactgacgttggcctaacactgggctgcagagactggaccccgcccagcattgggctgggctcgccacatcccatgagagtagagggcactgggtcgccgtgccccacggcaggcccctgcaggaaaactgaggcccttgggcacctcgacttgtgaacgagttgttggctgctccctccacagcttctgcagcagactgtccctgttgtaactgcccaaggcatgttttgcccaccagatcatggcccacgtggaggcccacctgcctctgtctcactgaactagaagccgagcctagaaactaacacagccatcaagggaatgacttgggcggccttgggaaatcgatgagaaattgaacttcagggagggtggtcattgcctagaggtgctcattcatttaacagagcttccttaggttgatgctggaggcagaatcccggctgtcaaggggtgttcagttaaggggagcaacagaggacatgaaaaattgctatgactaaagcagggacaatttgctgccaaacacccatgcccagctgtatggctgggggctcctcgtatgcatggaacccccagaataaatatgctcagccaccctgtgggccgggcaatccagacagcaggcataaggcaccagttaccctgcatgttggcccagacctcaggtgctagggaaggcgggaaccttgggttgagtaatgctcgtctgtgtgttttagtttcatcacctgttatctgtgtttgctgaggagagtggaacagaaggggtggagttttgtataaataaagtttctttgtctctttaaaaaaaaaaaaaaaaaaaaaa

SEQ ID NO: 138 - DNA, 3589 bp, Homo sapiens
gggtctccgcgcccaggaaagccccgcgcggcgcgggccagggaagggccacccaggggtcccccacttcccgcttgggcgcccggacggcgaatggagcaggggcgcgcaggtgccttggcatctcccaatggggtggctttgctctgggctcctgttccctgtgagctgcctggtcctgctgcaggtggcaagctctgggaacatgaaggtcttgcaggagcccacctgcgtctccgactacatgagcatctctacttgcgagtggaagatgaatggtcccaccaattgcagcaccgagctccgcctgttgtaccagctggtttttctgctctccgaagcccacacgtgtatccctgagaacaacggaggcgcggggtgcgtgtgccacctgctcatggatgacgtggtcagtgcggataactatacactggacctgtgggctgggcagcagctgctgtggaagggctccttcaagcccagcgagcatgtgaaacccagggccccaggaaacctgacagttcacaccaatgtctccgacactctgctgctgacctggagcaacccgtatccccctgacaattacctgtataatcatctcacctatgcagtcaacatttggagtgaaaacgacccggcagataatctataacgtgacctacctagaaccctccctccgcatcgcagccagcaccctgaagtctgggatttcctacagggcacgggtgagggcctgggctcagtgctataacaccacctggagtgagtggagccccagcaccaagtggcacaactcctacagggagcccttcgagcagcacctcctgctgggcgtcagcgtttcctgcattgtcatcctggccgtctgcctgttgtgctatgtcagcatcaccaagattaagaaagaatggtgggatcagattcccaacccagcccgcagccgcctcgtggctataataatccaggatgctcaggggtcacagtgggagaagcggtcccgaggccaggaaccagccaagtgcccacactggaagaattgtcttaccaagctcttgccctgttttctggagcacaacatgaaaagggatgaagatcctcacaaggctgccaaagagatgcctttccagggctctggaaaatcagcatggtgcccagtggagatcagcaagacagtcctctggccagagagcatcagcgtggtgcgatgtgtggagttgtttgaggccccggtggagtgtgaggaggaggaggaggtagaggaagaaaaagggagcttctgtgcatcgcctgagagcagcagggatgacttccaggagggaagggagggcattgtggcccggctaacagagagcctgttcctggacctgctcggagaggagaatgggggcttttgccagcaggacatgggggagtcatgccttcttccaccttcgggaagtacgagtgctcacatgccctgggatgagttcccaagtgcagggcccaaggaggcacctccctggggcaaggagcagcctctccacctggagccaagtcctcctgccagcccgacccagagtccagacaacctgacttgcacagagacgcccctcgtcatcgcaggcaaccctgcttaccgcagcttcagcaactccctgagccagtcaccgtgtcccagagagctgggtccagacccactgctggccagacacctggaggaagtagaacccgagatgccctgtgtcccccagctctctgagccaaccactgtgccccaacctgagccagaaacctgggagcagatcctccgccgaaatgtcctccagcatggggcagctgcagcccccgtctcggcccccaccagtggctatcaggagtttgtacatgcggtggagcagggtggcacccaggccagtgcggtggtgggcttgggtcccccaggagaggctggttacaaggccttctcaagcctgcttgccagcagtgctgtgtccccagagaaatgtgggtttggggctagcagtggggaagaggggtataagcctttccaagacctcattcctggctgccctggggaccctgccccagtccctgtccccttgttcacctttggactggacagggagccacctcgcagtccgcagagctcacatctcccaagcagctccccagagcacctgggtctggagccgggggaaaaggtagaggacatgccaaagcccccacttccccaggagcaggccacagacccccttgtggacagcctgggcagtggcattgtctactcagcccttacctgccacctgtgcggccacctgaaacagtgtcatggccaggaggatggtggccagacccctgtcatggccagtccttgctgtggctgctgctgtggagacaggtcctcgccccctacaacccccctgagggccccagacccctctccaggtggggttccactggaggccagtctgtgtccggcctccctggcaccctcgggcatctcagagaagagtaaatcctcatcatccttccatcctgcccctggcaatgctcagagctcaagccagacccccaaaatcgtgaactttgtctccgtgggacccacatacatgagggtctcttaggtgcatgtcctcttgttgctgagtctgcagatgaggactagggcttatccatgcctgggaaatgccacctcctggaaggcagccaggctggcagatttccaaaagacttgaagaaccatggtatgaaggtgattggccccactgacgttggcctaacactgggctgcagagactggaccccgcccagcattgggctgggctcgccacatcccatgagagtagagggcactgggtcgccgtgccccacggcaggcccctgcaggaaaactgaggcccttgggcacctcgacttgtgaacgagttgttggctgctccctccacagcttctgcagcagactgtccctgttgtaactgcccaaggcatgttttgcccaccagatcatggcccacgtggaggcccacctgcctctgtctcactgaactagaagccgagcctagaaactaacacagccatcaagggaatgacttgggcggccttgggaaatcgatgagaaattgaacttcagggagggtggtcattgcctagaggtgctcattcatttaacagagcttccttaggttgatgctggaggcagaatcccggctgtcaaggggtgttcagttaaggggagcaacagaggacatgaaaaattgctatgactaaagcagggacaatttgctgccaaacacccatgcccagctgtatggctgggggctcctcgtatgcatggaacccccagaataaatatgctcagccaccctgtgggccgggcaatccagacagcaggcataaggcaccagttaccctgcatgttggcccagacctcaggtgctagggaaggcgggaaccttgggttgagtaatgctcgtctgtgtgttttagtttcatcacctgttatctgtgtttgctgaggagagtggaacagaaggggtggagttttgtataaataaagtttctttgtctctttaaaaaaaaaaaaaaaaaaaaaaaaaaaaaaaaaaaaaaa

SEQ ID NO: 139 - protein, 178 aa, Homo sapiens
MHSSALLCCLVLLTGVRASPGQGTQSENSCTHFPGNLPNMLRDLRDAFSRVKTFFQMKDQLDNLLLKESLLEDFKGYLGCQALSEMIQFYLEEVMPQAENQDPDIKAHVNSLGENLKTLRLRLRRCHRFLPCENKSKAVEQVKNAFNKLQEKGIYKAMSEFDIFINYIEAYMTMKIRN

SEQ ID NO: 140 - protein, 160 aa, Homo sapiens
SPGQGTQSENSCTHFPGNLPNMLRDLRDAFSRVKTFFQMKDQLDNLLLKESLLEDFKGYLGCQALSEMIQFYLEEVMPQAENQDPDIKAHVNSLGENLKTLRLRLRRCHRFLPCENKSKAVEQVKNAFNKLQEKGIYKAMSEFDIFINYIEAYMTMKIRN

SEQ ID NO: 141 - DNA, 1629 bp, Homo sapiens
acacatcaggggcttgctcttgcaaaaccaaaccacaagacagacttgcaaaagaaggcatgcacagctcagcactgctctgttgcctggtcctcctgactggggtgagggccagcccaggccagggcacccagtctgagaacagctgcacccacttcccaggcaacctgcctaacatgcttcgagatctccgagatgccttcagcagagtgaagactttctttcaaatgaaggatcagctggacaacttgttgttaaaggagtccttgctggaggactttaagggttacctgggttgccaagccttgtctgagatgatccagttttacctggaggaggtgatgccccaagctgagaaccaagacccagacatcaaggcgcatgtgaactccctgggggagaacctgaagaccctcaggctgaggctacggcgctgtcatcgatttcttccctgtgaaaacaagagcaaggccgtggagcaggtgaagaatgcctttaataagctccaagagaaaggcatctacaaagccatgagtgagtttgacatcttcatcaactacatagaagcctacatgacaatgaagatacgaaactgagacatcagggtggcgactctatagactctaggacataaattagaggtctccaaaatcggatctggggctctgggatagctgacccagccccttgagaaaccttattgtacctctcttatagaatatttattacctctgatacctcaacccccatttctatttatttactgagcttctctgtgaacgatttagaaagaagcccaatattataatttttttcaatatttattattttcacctgtttttaagctgtttccatagggtgacacactatggtatttgagtgttttaagataaattataagttacataagggaggaaaaaaaatgttctttggggagccaacagaagcttccattccaagcctgaccacgctttctagctgttgagctgttttccctgacctccctctaatttatcttgtctctgggcttggggcttcctaactgctacaaatactcttaggaagagaaaccagggagcccctttgatgattaattcaccttccagtgtctcggagggattcccctaacctcattccccaaccacttcattcttgaaagctgtggccagcttgttatttataacaacctaaatttggttctaggccgggcgcggtggctcacgcctgtaatcccagcactttgggaggctgaggcgggtggatcacttgaggtcaggagttcctaaccagcctggtcaacatggtgaaaccccgtctctactaaaaatacaaaaattagccgggcatggtggcgcgcacctgtaatcccagctacttgggaggctgaggcaagagaattgcttgaacccaggagatggaagttgcagtgagctgatatcatgcccctgtactccagcctgggtgacagagcaagactctgtctcaaaaaataaaaataaaaataaatttggttctaatagaactcagttttaactagaatttattcaattcctctgggaatgttacattgtttgtctgtcttcatagcagattttaattttgaataaataaatgtatcttattcacatc

SEQ ID NO: 142 - protein, 178 aa, Mus musculus
MPGSALLCCLLLLTGMRISRGQYSREDNNCTHFPVGQSHMLLELRTAFSQVKTFFQTKDQLDNILLTDSLMQDFKGYLGCQALSEMIQFYLVEVMPQAEKHGPEIKEHLNSLGEKLKTLRMRLRRCHRFLPCENKSKAVEQVKSDFNKLQDQGVYKAMNEFDIFINCIEAYMMIKMKS

SEQ ID NO: 143 - DNA, 1306 bp, Mus musculus
acatttagagacttgctcttgcactaccaaagccacaaggcagccttgcagaaaagagagctccatcatgcctggctcagcactgctatgctgcctgctcttactgactggcatgaggatcagcaggggccagtacagccgggaagacaataactgcacccacttcccagtcggccagagccacatgctcctagagctgcggactgccttcagccaggtgaagactttctttcaaacaaaggaccagctggacaacatactgctaaccgactccttaatgcaggactttaagggttacttgggttgccaagccttatcggaaatgatccagttttacctggtagaagtgatgccccaggcagagaagcatggcccagaaatcaaggagcatttgaattccctgggtgagaagctgaagaccctcaggatgcggctgaggcgctgtcatcgatttctcccctgtgaaaataagagcaaggcagtggagcaggtgaagagtgattttaataagctccaagaccaaggtgtctacaaggccatgaatgaatttgacatcttcatcaactgcatagaagcatacatgatgatcaaaatgaaaagctaaaacacctgcagtgtgtattgagtctgctggactccaggacctagacagagctctctaaatctgatccagggatcttagctaacggaaacaactccttggaaaacctcgtttgtacctctctccgaaatatttattacctctgatacctcagttcccattctatttattcactgagcttctctgtgaactatttagaaagaagcccaatattataattttacagtatttattatttttaacctgtgtttaagctgtttccattggggacactttatagtatttaaagggagattatattatatgatgggaggggttcttccttgggaagcaattgaagcttctattctaaggctggccacacttgagagctgcagggccctttgctatggtgtcctttcaattgctctcatccctgagttcagagctcctaagagagttgtgaagaaactcatgggtcttgggaagagaaaccagggagatcctttgatgatcattcctgcagcagctcagagggttcccctactgtcatcccccagccgcttcatccctgaaaactgtggccagtttgttatttataaccacctaaaattagttctaatagaactcatttttaactagaagtaatgcaattcctctgggaatggtgtattgtttgtctgcctttgtagcagactctaattttgaataaatggatcttattcg

SEQ ID NO: 144 - protein, 178 aa, Rattus norvegicus
MPGSALLCCLLLLAGVKTSKGHSIRGDNNCTHFPVSQTHMLRELRAAFSQVKTFFQKKDQLDNILLTDSLLQDFKGYLGCQALSEMIKFYLVEVMPQAENHGPEIKEHLNSLGEKLKTLWIQLRRCHRFLPCENKSKAVEQVKNDFNKLQDKGVYKAMNEFDIFINCIEAYVTLKMKN

SEQ ID NO: 145 - DNA, 682 bp, Rattus norvegicus
catgcctggctcagcactgctatgttgcctgctcttactggctggagtgaagaccagcaaaggccattccatccggggtgacaataactgcacccacttcccagtcagccagacccacatgctccgagagctgagggctgccttcagtcaagtgaagactttctttcaaaagaaggaccagctggacaacatactgctgacagattccttactgcaggactttaagggttacttgggttgccaagccttgtcagaaatgatcaagttttacctggtagaagtgatgccccaggcagagaaccatggcccagaaatcaaggagcatttgaattccctgggagagaagctgaagaccctctggatacagctgcgacgctgtcatcgatttctcccctgtgagaataaaagcaaggcagtggagcaggtgaagaatgattttaataagctccaagacaaaggtgtctacaaggccatgaatgagtttgacatcttcatcaactgcatagaagcctacgtgacactcaaaatgaaaaattgaaccacccggcatctactggactgcaggacataaatagagcttctaaatctgatccagagatcttagctaacgggagcaactccttggaaaacctcgtttgtacctctctccaaaatatttattacctctgatacctcagttccc

SEQ ID NO: 146 - protein, 178 aa, Oryctolagus cuniculus
MLSSALLCCLVFLGGTGASRGQDTPAENSCIHFPGGLPHMLRELRAAFGRVKTFFQSKDQLNSMLLTESLLEDLKGYLGCQALSEMIQFYLKDVMPQAENHSPAIREHVNSLGENLKTLRLRLRQCHRFLPCENKSKAVEQVKSAFSKLQEEGVYKAMSEFDIFINYIETYMTMKIKS

SEQ ID NO: 147 - DNA, 1089 bp, Oryctolagus cuniculus
aaagcaaaccacaaggcggactcgtagaagcaggcagagttccaccatgctcagctcagctctgctatgttgcctggtcttcctgggtgggacaggggccagccgaggccaggacacccctgctgagaacagctgcattcactttccaggcggcctgccccacatgctccgcgagctccgtgctgcctttggcagggtgaagactttctttcaatcgaaggatcagctgaacagcatgttgttaaccgagtccctgctggaggaccttaagggttacctgggatgccaagccttgtcggagatgatccagttttacctgaaggacgtgatgccgcaagctgagaaccacagtccagccatcagggagcacgtgaactccctgggggaaaacctgaagaccctcaggctgaggctgcgacaatgtcaccgatttctcccctgtgaaaacaagagcaaggcagtggagcaggtgaagagcgccttcagcaagctgcaagaggaaggcgtctacaaagccatgagtgagtttgacatcttcatcaactacatagaaacctacatgacaatgaagataaaaagctaaaagccccaggatggcaactcggctagagtctaggacatcagttagggacctgcacaccctgggtcagctgacccagcaccttggaaagctgttgtacctctcaatatttattacctctgatacctcagctcccgatcctatttatttaccgagcttctctgtgaactctttagaaagaagcccactattataattttttcagtatttattattttcacctgcatttaagctgtacccatggggtgatgccctgtgggatttgagtgtcttaggagaaattataatttatgtgaaagggaaaatgtgccttggggagccgactgaggcttccattccttctgtgcctgaccacactttctaactcctaagccgagctccctcttaccctctggagcccggacctgggtctcgagtgttccagagactcctagcctcttaggaagagagaccggaagcccttgggtggtgaccttccggcagctcagagggaggctcctgacctcgat

SEQ ID NO: 148 - protein, 178 aa, Cercopithecidae
MHSSALLCCLVLLTGVRASPGQGTQSENSCTRFPGNLPHMLRDLRDAFSRVKTFFQMKDQLDNILLKESLLEDFKGYLGCQALSEMIQFYLEEVMPQAENHDPDIKEHVNSLGENLKTLRLRLRRCHRFLPCENKSKAVEQVKNAFSKLQEKGVYKAMSEFDIFINYIEAYMTMKIQN

SEQ ID NO: 149 - DNA, 643 bp, Cercopithecidae
agaaggcatgcacagctcagcactgctctgttgcctagtcctcctgactggggtgagggccagcccaggccagggcacccagtctgagaacagctgcacccgcttcccaggcaacctgcctcacatgcttcgagacctccgagatgccttcagcagagtgaagactttctttcaaatgaaggatcagctggacaacatattgttaaaggagtccttgctggaggactttaagggttacctgggttgccaagccttgtctgagatgatccagttttacctggaggaggtgatgccccaagctgagaaccacgacccagacatcaaggagcatgtgaactccctgggggagaatctgaagaccctcaggctgaggctgcggcgctgtcatcgatttcttccctgtgaaaacaagagcaaggccgtggagcaggtgaagaatgcctttagtaagctccaagagaaaggcgtctacaaagccatgagtgagtttgacatcttcatcaactacatagaagcctacatgacaatgaagatacaaaactgagacatcagggtggcgactctatagactctaggacataaattagaggtctccaaaatcagatccagggttctgggatagctgacccagccccttgagaaa

SEQ ID NO: 150 - protein, 578 aa, Homo sapiens
MLPCLVVLLAALLSLRLGSDAHGTELPSPPSVWFEAEFFHHILHWTPIPNQSESTCYEVALLRYGIESWNSISNCSQTLSYDLTAVTLDLYHSNGYRARVRAVDGSRHSNWTVTNTRFSVDEVTLTVGSVNLEIHNGFILGKIQLPRPKMAPANDTYESIFSHFREYEIAIRKVPGNFTFTHKKVKHENFSLLTSGEVGEFCVQVKPSVASRSNKGMWSKEECISLTRQYFTVTNVIIFFAFVLLLSGALAYCLALQLYVRRRKKLPSVLLFKKPSPFIFISQRPSPETQDTIHPLDEEAFLKVSPELKNLDLHGSTDSGFGSTKPSLQTEEPQFLLPDPHPQADRTLGNREPPVLGDSCSSGSSNSTDSGICLQEPSLSPSTGPTWEQQVGSNSRGQDDSGIDLVQNSEGRAGDTQGGSALGHHSPPEPEVPGEEDPAAVAFQGYLRQTRCAEEKATKTGCLEEESPLTDGLGPKFGRCLVDEAGLHPPALAKGYLKQDPLEMTLASSGAPTGQWNQPTEEWSLLALSSCSDLGISDWSFAHDLAPLGCVAAPGGLLGSFNSDLVTLPLISSLQSSE

SEQ ID NO: 151 - DNA, 3672 bp, Homo sapiens
gtcagtcccagcccaagggtagctggaggcgcgcaggccggctccgctccggccccggacgatgcggcgcgcccaggatgctgccgtgcctcgtagtgctgctggcggcgctcctcagcctccgtcttggctcagacgctcatgggacagagctgcccagccctccgtctgtgtggtttgaagcagaatttttccaccacatcctccactggacacccatcccaaatcagtctgaaagtacctgctatgaagtggcgctcctgaggtatggaatagagtcctggaactccatctccaactgtagccagaccctgtcctatgaccttaccgcagtgaccttggacctgtaccacagcaatggctaccgggccagagtgcgggctgtggacggcagccggcactccaactggaccgtcaccaacacccgcttctctgtggatgaagtgactctgacagttggcagtgtgaacctagagatccacaatggcttcatcctcgggaagattcagctacccaggcccaagatggcccccgcaaatgacacatatgaaagcatcttcagtcacttccgagagtatgagattgccattcgcaaggtgccgggaaacttcacgttcacacacaagaaagtaaaacatgaaaacttcagcctcctaacctctggagaagtgggagagttctgtgtccaggtgaaaccatctgtcgcttcccgaagtaacaaggggatgtggtctaaagaggagtgcatctccctcaccaggcagtatttcaccgtgaccaacgtcatcatcttctttgcctttgtcctgctgctctccggagccctcgcctactgcctggccctccagctgtatgtgcggcgccgaaagaagctacccagtgtcctgctcttcaagaagcccagccccttcatcttcatcagccagcgtccctccccagagacccaagacaccatccacccgcttgatgaggaggcctttttgaaggtgtccccagagctgaagaacttggacctgcacggcagcacagacagtggctttggcagcaccaagccatccctgcagactgaagagccccagttcctcctccctgaccctcacccccaggctgacagaacgctgggaaacagggagccccctgtgctgggggacagctgcagtagtggcagcagcaatagcacagacagcgggatctgcctgcaggagcccagcctgagccccagcacagggcccacctgggagcaacaggtggggagcaacagcaggggccaggatgacagtggcattgacttagttcaaaactctgagggccgggctggggacacacagggtggctcggccttgggccaccacagtcccccggagcctgaggtgcctggggaagaagacccagctgctgtggcattccagggttacctgaggcagaccagatgtgctgaagagaaggcaaccaagacaggctgcctggaggaagaatcgcccttgacagatggccttggccccaaattcgggagatgcctggttgatgaggcaggcttgcatccaccagccctggccaagggctatttgaaacaggatcctctagaaatgactctggcttcctcaggggccccaacgggacagtggaaccagcccactgaggaatggtcactcctggccttgagcagctgcagtgacctgggaatatctgactggagctttgcccatgaccttgcccctctaggctgtgtggcagccccaggtggtctcctgggcagctttaactcagacctggtcaccctgcccctcatctctagcctgcagtcaagtgagtgactcgggctgagaggctgcttttgattttagccatgcctgctcctctgcctggaccaggaggagggcccctggggcagaagttaggcacgaggcagtctgggcacttttctgcaagtccactggggctggccccagccaggccctgcagggctggtcagggtgtctggggcaggaggaggccaactcactgaactagtgcagggtatgtgggtggcactgacctgttctgttgactggggccctgcagactctggcagagctgagaagggcagggaccttctccctcctaggaactctttcctgtatcataaaggattatttgctcaggggaaccatggggctttctggagttgtggtgaggccaccaggctgaagtcagctcagacccagacctccctgcttaggccactcgagcatcagagcttccagcaggaggaagggctgtaggaatggaagcttcagggccttgctgctggggtcatttttaggggaaaaaggaggatatgatggtcacatggggaacctcccctcatcgggcctctggggcaggaagcttgtcactggaagatcttaaggtatatattttctggacactcaaacacatcataatggattcactgaggggagacaaagggagccgagaccctggatggggcttccagctcagaacccatccctctggtgggtacctctggcacccatctgcaaatatctccctctctccaacaaatggagtagcatccccctggggcacttgctgaggccaagccactcacatcctcactttgctgccccaccatcttgctgacaacttccagagaagccatggttttttgtattggtcataactcagccctttgggcggcctctgggcttgggcaccagctcatgccagccccagagggtcagggttggaggcctgtgcttgtgtttgctgctaatgtccagctacagacccagaggataagccactgggcactgggctggggtccctgccttgttggtgttcagctgtgtgattttggactagccacttgtcagagggcctcaatctcccatctgtgaaataaggactccacctttaggggaccctccatgtttgctgggtattagccaagctggtcctgggagaatgcagatactgtccgtggactaccaagctggcttgtttcttatgccagaggctaacagatccaatgggagtccatggtgtcatgccaagacagtatcagacacagccccagaagggggcattatgggccctgcctccccataggccatttggactctgccttcaaacaaaggcagttcagtccacaggcatggaagctgtgaggggacaggcctgtgcgtgccatccagagtcatctcagccctgcctttctctggagcattctgaaaacagatattctggcccagggaatccagccatgacccccacccctctgccaaagtactcttaggtgccagtctggtaactgaactccctctggaggcaggcttgagggaggattcctcagggttcccttgaaagctttatttatttattttgttcatttatttattggagaggcagcattgcacagtgaaagaattctggatatctcaggagccccgaaattctagctctgactttgctgtttccagtggtatgaccttggagaagtcacttatcctcttggagcctcagtttcctcatctgcagaataatgactgacttgtctaattcgtagggatgtgaggttctgctgaggaaatgggtatgaatgtgccttgaacacaaagctctgtcaataagtgatacatgttttttattccaataaattgtcaagaccacaggaaaaaaaaaaaaaaaaaa

SEQ ID NO: 152 - DNA, 3802 bp, Homo sapiens
gtcagtcccagcccaagggtagctggaggcgcgcaggccggctccgctccggccccggacgatgcggcgcgcccaggatgctgccgtgcctcgtagtgctgctggcggcgctcctcagcctccgtcttggctcagacgctcatggctcacctgttgtggaagtggaagaggctgaaattgacaggaactgacggattgggaaggatagagaagtatgcgcaaggccaaacccccaacccgcaaacctcatcatccacccacttctagatgagccggacagagctgcccagccctccgtctgtgtggtttgaagcagaatttttccaccacatcctccactggacacccatcccaaatcagtctgaaagtacctgctatgaagtggcgctcctgaggtatggaatagagtcctggaactccatctccaactgtagccagaccctgtcctatgaccttaccgcagtgaccttggacctgtaccacagcaatggctaccgggccagagtgcgggctgtggacggcagccggcactccaactggaccgtcaccaacacccgcttctctgtggatgaagtgactctgacagttggcagtgtgaacctagagatccacaatggcttcatcctcgggaagattcagctacccaggcccaagatggcccccgcaaatgacacatatgaaagcatcttcagtcacttccgagagtatgagattgccattcgcaaggtgccgggaaacttcacgttcacacacaagaaagtaaaacatgaaaacttcagcctcctaacctctggagaagtgggagagttctgtgtccaggtgaaaccatctgtcgcttcccgaagtaacaaggggatgtggtctaaagaggagtgcatctccctcaccaggcagtatttcaccgtgaccaacgtcatcatcttctttgcctttgtcctgctgctctccggagccctcgcctactgcctggccctccagctgtatgtgcggcgccgaaagaagctacccagtgtcctgctcttcaagaagcccagccccttcatcttcatcagccagcgtccctccccagagacccaagacaccatccacccgcttgatgaggaggcctttttgaaggtgtccccagagctgaagaacttggacctgcacggcagcacagacagtggctttggcagcaccaagccatccctgcagactgaagagccccagttcctcctccctgaccctcacccccaggctgacagaacgctgggaaacagggagccccctgtgctgggggacagctgcagtagtggcagcagcaatagcacagacagcgggatctgcctgcaggagcccagcctgagccccagcacagggcccacctgggagcaacaggtggggagcaacagcaggggccaggatgacagtggcattgacttagttcaaaactctgagggccgggctggggacacacagggtggctcggccttgggccaccacagtcccccggagcctgaggtgcctggggaagaagacccagctgctgtggcattccagggttacctgaggcagaccagatgtgctgaagagaaggcaaccaagacaggctgcctggaggaagaatcgcccttgacagatggccttggccccaaattcgggagatgcctggttgatgaggcaggcttgcatccaccagccctggccaagggctatttgaaacaggatcctctagaaatgactctggcttcctcaggggccccaacgggacagtggaaccagcccactgaggaatggtcactcctggccttgagcagctgcagtgacctgggaatatctgactggagctttgcccatgaccttgcccctctaggctgtgtggcagccccaggtggtctcctgggcagctttaactcagacctggtcaccctgcccctcatctctagcctgcagtcaagtgagtgactcgggctgagaggctgcttttgattttagccatgcctgctcctctgcctggaccaggaggagggcccctggggcagaagttaggcacgaggcagtctgggcacttttctgcaagtccactggggctggccccagccaggccctgcagggctggtcagggtgtctggggcaggaggaggccaactcactgaactagtgcagggtatgtgggtggcactgacctgttctgttgactggggccctgcagactctggcagagctgagaagggcagggaccttctccctcctaggaactctttcctgtatcataaaggattatttgctcaggggaaccatggggctttctggagttgtggtgaggccaccaggctgaagtcagctcagacccagacctccctgcttaggccactcgagcatcagagcttccagcaggaggaagggctgtaggaatggaagcttcagggccttgctgctggggtcatttttaggggaaaaaggaggatatgatggtcacatggggaacctcccctcatcgggcctctggggcaggaagcttgtcactggaagatcttaaggtatatattttctggacactcaaacacatcataatggattcactgaggggagacaaagggagccgagaccctggatggggcttccagctcagaacccatccctctggtgggtacctctggcacccatctgcaaatatctccctctctccaacaaatggagtagcatccccctggggcacttgctgaggccaagccactcacatcctcactttgctgccccaccatcttgctgacaacttccagagaagccatggttttttgtattggtcataactcagccctttgggcggcctctgggcttgggcaccagctcatgccagccccagagggtcagggttggaggcctgtgcttgtgtttgctgctaatgtccagctacagacccagaggataagccactgggcactgggctggggtccctgccttgttggtgttcagctgtgtgattttggactagccacttgtcagagggcctcaatctcccatctgtgaaataaggactccacctttaggggaccctccatgtttgctgggtattagccaagctggtcctgggagaatgcagatactgtccgtggactaccaagctggcttgtttcttatgccagaggctaacagatccaatgggagtccatggtgtcatgccaagacagtatcagacacagccccagaagggggcattatgggccctgcctccccataggccatttggactctgccttcaaacaaaggcagttcagtccacaggcatggaagctgtgaggggacaggcctgtgcgtgccatccagagtcatctcagccctgcctttctctggagcattctgaaaacagatattctggcccagggaatccagccatgacccccacccctctgccaaagtactcttaggtgccagtctggtaactgaactccctctggaggcaggcttgagggaggattcctcagggttcccttgaaagctttatttatttattttgttcatttatttattggagaggcagcattgcacagtgaaagaattctggatatctcaggagccccgaaattctagctctgactttgctgtttccagtggtatgaccttggagaagtcacttatcctcttggagcctcagtttcctcatctgcagaataatgactgacttgtctaattcgtagggatgtgaggttctgctgaggaaatgggtatgaatgtgccttgaacacaaagctctgtcaataagtgatacatgttttttattccaataaattgtcaagaccacaggaaaaaaaaaaaaaaaaaa

SEQ ID NO: 153 - protein, 325 aa, Homo sapiens
MAWSLGSWLGGCLLVSALGMVPPPENVRMNSVNFKNILQWESPAFAKGNLTFTAQYLSYRIFQDKCMNTTLTECDFSSLSKYGDHTLRVRAEFADEHSDWVNITFCPVDDTIIGPPGMQVEVLADSLHMRFLAPKIENEYETWTMKNVYNSWTYNVQYWKNGTDEKFQITPQYDFEVLRNLEPWTTYCVQVRGFLPDRNKAGEWSEPVCEQTTHDETVPSWMVAVILMASVFMVCLALLGCFALLWCVYKKTKYAFSPRNSLPQHLKEFLGHPHHNTLLFFSFPLSDENDVFDKLSVIAEDSESGKQNPGDSCSLGTPPGQGPQS

SEQ ID NO: 154 - DNA, 1966 bp, Homo sapiens
cccgcccatctccgctggttcccggaagccgccgcggacaagctctcccgggcgcgggcgggggtcgtgtgcttggaggaagccgcggaacccccagcgtccgtccatggcgtggagccttgggagctggctgggtggctgcctgctggtgtcagcattgggaatggtaccacctcccgaaaatgtcagaatgaattctgttaatttcaagaacattctacagtgggagtcacctgcttttgccaaagggaacctgactttcacagctcagtacctaagttataggatattccaagataaatgcatgaatactaccttgacggaatgtgatttctcaagtctttccaagtatggtgaccacaccttgagagtcagggctgaatttgcagatgagcattcagactgggtaaacatcaccttctgtcctgtggatgacaccattattggaccccctggaatgcaagtagaagtacttgctgattctttacatatgcgtttcttagcccctaaaattgagaatgaatacgaaacttggactatgaagaatgtgtataactcatggacttataatgtgcaatactggaaaaacggtactgatgaaaagtttcaaattactccccagtatgactttgaggtcctcagaaacctggagccatggacaacttattgtgttcaagttcgagggtttcttcctgatcggaacaaagctggggaatggagtgagcctgtctgtgagcaaacaacccatgacgaaacggtcccctcctggatggtggccgtcatcctcatggcctcggtcttcatggtctgcctggcactcctcggctgcttcgccttgctgtggtgcgtttacaagaagacaaagtacgccttctcccctaggaattctcttccacagcacctgaaagagtttttgggccatcctcatcataacacacttctgtttttctcctttccattgtcggatgagaatgatgtttttgacaagctaagtgtcattgcagaagactctgagagcggcaagcagaatcctggtgacagctgcagcctcgggaccccgcctgggcaggggccccaaagctaggctctgagaaggaaacacactcggctgggcacagtgacgtactccatctcacatctgcctcagtgagggatcagggcagcaaacaagggccaagaccatctgagccagccccacatctagaactcccagaccctggacttagccaccagagagctacattttaaaggctgtcttggcaaaaatactccatttgggaactcactgccttataaaggctttcatgatgttttcagaagttggccactgagagtgtaattttcagccttttatatcactaaaataagatcatgttttaattgtgagaaacagggccgagcacagtggctcacgcctgtaataccagcaccttagaggtcgaggcaggcggatcacttgaggtcaggagttcaagaccagcctggccaatatggtgaaacccagtctctactaaaaatacaaaaattagctaggcatgatggcgcatgcctataatcccagctactcgagtgcctgaggcaggagaattgcatgaacccgggaggaggaggaggaggttgcagtgagccgagatagcggcactgcactccagcctgggtgacaaagtgagactccatctcaaaaaaaaaaaaaaaaaaaattgtgagaaacagaaatacttaaaatgaggaataagaatggagatgttacatctggtagatgtaacattctaccagattatggatggactgatctgaaaatcgacctcaactcaagggtggtcagctcaatgctacacagagcacggacttttggattctttgcagtactttgaatttatttttctacctatatatgttttatatgctgctggtgctccattaaagttttactctgtgttgcactatatgtgttcatgataaaaaa

SEQ ID NO: 155 - DNA, 7878 bp, Homo sapiens
ttttccctgctctcaccgggcgggggagagaagccctctggacagcttctagagtgtgcaggttctcgtatccctcggccaagggtatcctctgcaaacctctgcaaacccagcgcaactacggtcccccggtcagacccaggatggggccagaacggacaggggccgcgccgctgccgctgctgctggtgttagcgctcagtcaaggcattttaaattgttgtttggcctacaatgttggtctcccagaagcaaaaatattttccggtccttcaagtgaacagtttggctatgcagtgcagcagtttataaatccaaaaggcaactggttactggttggttcaccctggagtggctttcctgagaaccgaatgggagatgtgtataaatgtcctgttgacctatccactgccacatgtgaaaaactaaatttgcaaacttcaacaagcattccaaatgttactgagatgaaaaccaacatgagcctcggcttgatcctcaccaggaacatgggaactggaggttttctcacatgtggtcctctgtgggcacagcaatgtgggaatcagtattacacaacgggtgtgtgttctgacatcagtcctgattttcagctctcagccagcttctcacctgcaactcagccctgcccttccctcatagatgttgtggttgtgtgtgatgaatcaaatagtatttatccttgggatgcagtaaagaattttttggaaaaatttgtacaaggcctggatataggccccacaaagacacaggtggggttaattcagtatgccaataatccaagagttgtgtttaacttgaacacatataaaaccaaagaagaaatgattgtagcaacatcccagacatcccaatatggtggggacctcacaaacacattcggagcaattcaatatgcaagaaaatatgcttattcagcagcttctggtgggcgacgaagtgctacgaaagtaatggtagttgtaactgacggtgaatcacatgatggttcaatgttgaaagctgtgattgatcaatgcaaccatgacaatatactgaggtttggcatagcagttcttgggtacttaaacagaaacgcccttgatactaaaaatttaataaaagaaataaaagcaatcgctagtattccaacagaaagatactttttcaatgtgtctgatgaagcagctctactagaaaaggctgggacattaggagaacaaattttcagcattgaaggtactgttcaaggaggagacaactttcagatggaaatgtcacaagtgggattcagtgcagattactcttctcaaaatgatattctgatgctgggtgcagtgggagcttttggctggagtgggaccattgtccagaagacatctcatggccatttgatctttcctaaacaagcctttgaccaaattctgcaggacagaaatcacagttcatatttaggttactctgtggctgcaatttctactggagaaagcactcactttgttgctggtgctcctcgggcaaattataccggccagatagtgctatatagtgtgaatgagaatggcaatatcacggttattcaggctcaccgaggtgaccagattggctcctattttggtagtgtgctgtgttcagttgatgtggataaagacaccattacagacgtgctcttggtaggtgcaccaatgtacatgagtgacctaaagaaagaggaaggaagagtctacctgtttactatcaaagagggcattttgggtcagcaccaatttcttgaaggccccgagggcattgaaaacactcgatttggttcagcaattgcagctctttcagacatcaacatggatggctttaatgatgtgattgttggttcaccactagaaaatcagaattctggagctgtatacatttacaatggtcatcagggcactatccgcacaaagtattcccagaaaatcttgggatccgatggagcctttaggagccatctccagtactttgggaggtccttggatggctatggagatttaaatggggattccatcaccgatgtgtctattggtgcctttggacaagtggttcaactctggtcacaaagtattgctgatgtagctatagaagcttcattcacaccagaaaaaatcactttggtcaacaagaatgctcagataattctcaaactctgcttcagtgcaaagttcagacctactaagcaaaacaatcaagtggccattgtatataacatcacacttgatgcagatggattttcatccagagtaacctccagggggttatttaaagaaaacaatgaaaggtgcctgcagaagaatatggtagtaaatcaagcacagagttgccccgagcacatcatttatatacaggagccctctgatgttgtcaactctttggatttgcgtgtggacatcagtctggaaaaccctggcactagccctgcccttgaagcctattctgagactgccaaggtcttcagtattcctttccacaaagactgtggtgaggacggactttgcatttctgatctagtcctagatgtccgacaaataccagctgctcaagaacaaccctttattgtcagcaaccaaaacaaaaggttaacattttcagtaacgctgaaaaataaaagggaaagtgcatacaacactggaattgttgttgatttttcagaaaacttgttttttgcatcattctccctgccggttgatgggacagaagtaacatgccaggtggctgcatctcagaagtctgttgcctgcgatgtaggctaccctgctttaaagagagaacaacaggtgacttttactattaactttgacttcaatcttcaaaaccttcagaatcaggcgtctctcagtttccaagccttaagtgaaagccaagaagaaaacaaggctgataatttggtcaacctcaaaattcctctcctgtatgatgctgaaattcacttaacaagatctaccaacataaatttttatgaaatctcttcggatgggaatgttccttcaatcgtgcacagttttgaagatgttggtccaaaattcatcttctccctgaaggtaacaacaggaagtgttccagtaagcatggcaactgtaatcatccacatccctcagtataccaaagaaaagaacccactgatgtacctaactggggtgcaaacagacaaggctggtgacatcagttgtaatgcagatatcaatccactgaaaataggacaaacatcttcttctgtatctttcaaaagtgaaaatttcaggcacaccaaagaattgaactgcagaactgcttcctgtagtaatgttacctgctggttgaaagacgttcacatgaaaggagaatactttgttaatgtgactaccagaatttggaacgggactttcgcatcatcaacgttccagacagtacagctaacggcagctgcagaaatcaacacctataaccctgagatatatgtgattgaagataacactgttacgattcccctgatgataatgaaacctgatgagaaagccgaagtaccaacaggagttataataggaagtataattgctggaatccttttgctgttagctctggttgcaattttatggaagctcggcttcttcaaaagaaaatatgaaaagatgaccaaaaatccagatgagattgatgagaccacagagctcagtagctgaaccagcagacctacctgcagtgggaaccggcagcatcccagccagggtttgctgtttgcgtgaatggatttctttttaaatcccatattttttttatcatgtcgtaggtaaactaacctggtattttaagagaaaactgcaggtcagtttggaatgaagaaattgtggggggtgggggaggtgcggggggcaggtagggaaataatagggaaaatacctattttatatgatgggggaaaaaaagtaatctttaaactggctggcccagagtttacattctaatttgcattgtgtcagaaacatgaaatgcttccaagcatgacaacttttaaagaaaaatatgatactctcagattttaagggggaaaactgttctctttaaaatatttgtctttaaacagcaactacagaagtggaagtgcttgatatgtaagtacttccacttgtgtatattttaatgaatattgatgttaacaagaggggaaaacaaaacacaggttttttcaatttatgctgctcatccaaagttgccacagatgatacttccaagtgataattttatttataaactaggtaaaatttgttgttggttccttttagaccacggctgccccttccacaccccatcttgctctaatgatcaaaacatgcttgaataactgagcttagagtatacctcctatatgtccatttaagttaggagagggggcgatatagagaataaggcacaaaattttgtttaaaactcagaatataacatgtaaaatcccatctgctagaagcccatcctgtgccagaggaaggaaaaggaggaaatttcctttctcttttaggaggcacaacagttctcttctaggatttgtttggctgactggcagtaacctagtgaatttctgaaagatgagtaatttctttggcaaccttcctcctcccttactgaaccactctcccacctcctggtggtaccattattatagaagccctctacagcctgactttctctccagcggtccaaagttatcccctcctttacccctcatccaaagttcccactccttcaggacagctgctgtgcattagatattaggggggaaagtcatctgtttaatttacacacttgcatgaattactgtatataaactccttaacttcagggagctattttcatttagtgctaaacaagtaagaaaaataagctcgagtgaatttctaaatgttggaatgttatgggatgtaaacaatgtaaagtaagacatctcaggatttcaccagaagttacagatgaggcactggaagccaccaaattagcaggtgcaccttctgtggctgtcttgtttctgaagtacttaaacttccacaagagtgaatttgacctaggcaagtttgttcaaaaggtagatcctgagatgatttggtcagattgggataaggcccagcaatctgcattttaacaagcaccccagtcactaggatgcagatggaccacactttgagaaacaccacccatttctactttttgcaccttattttctctgttcctgagcccccacattctctaggagaaacttagaggaaaagggcacagacactacatatctaaagctttggacaagtccttgacctctataaacttcagagtcctcattataaaatgggaagactgagctggagttcagcagtgatgcttttagttttaaaagtctatgatctggacttcctataatacaaatacacaatcctccaagaatttgacttggaaaaaaatgtcaaaggaaaacaggttatctgcccatgtgcatatggacaaccttgactaccctggcctggcccgtggtggcagtccagggctatctgtactgtttacagaattactttgtagttgacaacacaaaacaaacaaaaaaggcataaaatgccagcggtttatagaaaaaacagcatggtattctccagttaggtatgccagagtccaattcttttaacagctgtgagaatttgctgcttcattccaacaaaattttatttaaaaaaaaaaaaaaaagactggagaaactagtcattagcttgataaagaatatttaacagctagtggtgctggtgtgtacctgaagctccagctacttgagagactgagacaggaagatcgcttgagcccaggagttcaagtccagcctaagcaacatagcaagaccctgtctcaaaaaaatgactatttaaaaagacaatgtggccaggcacggtggctcacacctgtaatcccaacactttgggaggctgaggccggtggatcacgaggtcaggagtttgagactagcctggccaacatggtgaaaccccatctctaataatataaaaattagctgggcgtagtagcaggtgcctgtaatcccagttactcgggaagctgaggcaggagaatcacttgaacccgggaggcagaggtttcagtgagccgagatcgcgccactgcactccagcctgggtgacagggcaagactctgtctcaaacaaacaaacaaaaaaaaagttagtactgtatatgtaaatactagcttttcaatgtgctatacaaacaattatagcacatccttccttttactctgtctcacctcctttaggtgagtacttccttaaataagtgctaaacatacatatacggaacttgaaagctttggttagccttgccttaggtaatcagcctagtttacactgtttccagggagtagttgaattactataaaccattagccacttgtctctgcaccatttatcacaccaggacagggtctctcaacctgggcgctactgtcatttggggccaggtgattcttccttgcaggggctgtcctgtaccttgtaggacagcagccctgtcctagaaggtatgtttagcagcattcctggcctctagctacccgatgccagagcatgctccccccgcagtcatgacaatcaaaaaatgtctccagacattgtcaaatgcctcctggggggcagtatttctcaagcacttttaagcaaaggtaagtattcatacaagaaatttagggggaaaaaacattgtttaaataaaagctatgtgttcctattcaacaatatttttgctttaaaagtaagtagagggcataaaagatgtcatattcaaatttccatttcataaatggtgtacagacaaggtctatagaatgtggtaaaaacttgactgcaacacaaggcttataaaatagtaagatagtaaaatagcttatgaagaaactacagagatttaaaattgtgcatgactcatttcagcagcaaaataagaactcctaactgaacagaaatttttctacctagcaatgttattcttgtaaaatagttacctattaaaactgtgaagagtaaaactaaagccaatttattatagtcacacaagtgattatactaaaaattattataaaggttataattttataatgtatttacctgtcctgatatatagctataacccaatatatgaaaatctcaaaaattaagacatcatcatacagaaggcaggattccttaaactgagatccctgatccatctttaatatttcaatttgcacacataaaacaatgcccttttgtgtacattcaggcatacccattttaatcaatttgaaaggttaatttaaacctctagaggtgaatgagaaacatgggggaaaagtatgaaataggtgaaaatcttaactatttctttgaactctaaagactgaaactgtagccattatgtaaataaagtttcatatgtacctgtttattttggcagattaagtcaaaatatgaatgtatatattgcataactatgttagaattgtatatattttaaagaaattgtcttggatattttcctttatacataatagataagtcttttttcaaatgtggtgtttgatgtttttgattaaatgtgttttgcctctttccacaaaaactgtaaaaataaatgcatgtttgtacaaaaagttgcagaattcatttgatttatgagaaacaaaaattaaattgtagtcaacagttagtagtttttctcatatccaagtataacaaacagaaaagtttcattattgtaacccacttttttcataccacattattgaatattgttacaattgttttgaaaataaagccattttctttgggcttttataagttaaaaaaaaaa

SEQ ID NO: 156 - DNA, 3449 bp, Homo sapiens
gctctgcccgttgctcagcaagttacttggggttccagtttgataagaaaagacttcctgtggaggaatctgaagggaaggaggaggagctggcccattcctgcctgggaggttgtggaagaaggaagatggccagagctttgtgtccactgcaagccctctggcttctggagtgggtgctgctgctcttgggaccttgtgctgcccctccagcctgggccttgaacctggacccagtgcagctcaccttctatgcaggccccaatggcagccagtttggattttcactggacttccacaaggacagccatgggagagtggccatcgtggtgggcgccccgcggaccctgggccccagccaggaggagacgggcggcgtgttcctgtgcccctggagggccgagggcggccagtgcccctcgctgctctttgacctccgtgatgagacccgaaatgtaggctcccaaactttacaaaccttcaaggcccgccaaggactgggggcgtcggtcgtcagctggagcgacgtcattgtggcctgcgccccctggcagcactggaacgtcctagaaaagactgaggaggctgagaagacgcccgtaggtagctgctttttggctcagccagagagcggccgccgcgccgagtactccccctgtcgcgggaacaccctgagccgcatttacgtggaaaatgattttagctgggacaagcgttactgtgaagcgggcttcagctccgtggtcactcaggccggagagctggtgcttggggctcctggcggctattatttcttaggtctcctggcccaggctccagttgcggatattttctcgagttaccgcccaggcatccttttgtggcacgtgtcctcccagagcctctcctttgactccagcaacccagagtacttcgacggctactgggggtactcggtggccgtgggcgagttcgacggggatctcaacactacagaatatgtcgtcggtgcccccacttggagctggaccctgggagcggtggaaattttggattcctactaccagaggctgcatcggctgcgcggagagcagatggcgtcgtattttgggcattcagtggctgtcactgacgtcaacggggatgggaggcatgatctgctggtgggcgctccactgtatatggagagccgggcagaccgaaaactggccgaagtggggcgtgtgtatttgttcctgcagccgcgaggcccccacgcgctgggtgcccccagcctcctgctgactggcacacagctctatgggcgattcggctctgccatcgcacccctgggcgacctcgaccgggatggctacaatgacattgcagtggctgccccctacgggggtcccagtggccggggccaagtgctggtgttcctgggtcagagtgaggggctgaggtcacgtccctcccaggtcctggacagccccttccccacaggctctgcctttggcttctcccttcgaggtgccgtagacatcgatgacaacggatacccagacctgatcgtgggagcttacggggccaaccaggtggctgtgtacagagctcagccagtggtgaaggcctctgtccagctactggtgcaagattcactgaatcctgctgtgaagagctgtgtcctacctcagaccaagacacccgtgagctgcttcaacatccagatgtgtgttggagccactgggcacaacattcctcagaagctatccctaaatgccgagctgcagctggaccggcagaagccccgccagggccggcgggtgctgctgctgggctctcaacaggcaggcaccaccctgaacctggatctgggcggaaagcacagccccatctgccacaccaccatggccttccttcgagatgaggcagacttccgggacaagctgagccccattgtgctcagcctcaatgtgtccctaccgcccacggaggctggaatggcccctgctgtcgtgctgcatggagacacccatgtgcaggagcagacacgaatcgtcctggactgtggggaagatgacgtatgtgtgccccagcttcagctcactgccagcgtgacgggctccccgctcctagttggggcagataatgtcctggagctgcagatggacgcagccaacgagggcgagggggcctatgaagcagagctggccgtgcacctgccccagggcgcccactacatgcgggccctaagcaatgtcgagggctttgagagactcatctgtaatcagaagaaggagaatgagaccagggtggtgctgtgtgagctgggcaaccccatgaagaagaacgcccagataggaatcgcgatgttggtgagcgtggggaatctggaagaggctggggagtctgtgtccttccagctgcagatacggagcaagaacagccagaatccaaacagcaagattgtgctgctggacgtgccggtccgggcagaggcccaagtggagctgcgagggaactcctttccagcctccctggtggtggcagcagaagaaggtgagagggagcagaacagcttggacagctggggacccaaagtggagcacacctatgagctccacaacaatggccctgggactgtgaatggtcttcacctcagcatccaccttccgggacagtcccagccctccgacctgctctacatcctggatatacagccccaggggggccttcagtgcttcccacagcctcctgtcaaccctctcaaggtggactgggggctgcccatccccagcccctcccccattcacccggcccatcacaagcgggatcgcagacagatcttcctgccagagcccgagcagccctcgaggcttcaggatccagttctcgtaagctgcgactcggcgccctgtactgtggtgcagtgtgacctgcaggagatggcgcgcgggcagcgggccatggtcacggtgctggccttcctgtggctgcccagcctctaccagaggcctctggatcagtttgtgctgcagtcgcacgcatggttcaacgtgtcctccctcccctatgcggtgcccccgctcagcctgccccgaggggaagctcaggtgtggacacagctgctccgggccttggaggagagggccattccaatctggtgggtgctggtgggtgtgctgggtggcctgctgctgctcaccatcctggtcctggccatgtggaaggtcggcttcttcaagcggaaccggccacccctggaagaagatgatgaagagggggagtgatggtgcagcctacactattctagcaggagggttgggcgtgctacctgcaccgccccttctccaacaagttgcctccaagctttgggttggagctgttccattgggtcctcttggtgtcgtttccctcccaacagagctgggctaccccccctcctgctgcctaataaagagactgagccctgaaaaaaaaaaaaaaaaaaa

SEQ ID NO: 157 - DNA, 7281 bp, Homo sapiens
ataacgtctttgtcactaaaatgttccccaggggccttcggcgagtctttttgtttggttttttgtttttaatctgtggctcttgataatttatctagtggttgcctacacctgaaaaacaagacacagtgtttaactatcaacgaaagaactggacggctccccgccgcagtcccactccccgagtttgtggctggcatttgggccacgccgggctgggcggtcacagcgaggggcgcgcagtttggggtcacacagctccgcttctaggccccaaccaccgttaaaaggggaagcccgtgccccatcaggtccgctcttgctgagcccagagccatcccgcgctctgcgggctgggaggcccgggccaggacgcgagtcctgcgcagccgaggttccccagcgccccctgcagccgcgcgtaggcagagacggagcccggccctgcgcctccgcaccacgcccgggaccccacccagcggcccgtacccggagaagcagcgcgagcacccgaagctcccggctggcggcagaaaccgggagtggggccgggcgagtgcgcggcatcccaggccggcccgaacgctccgcccgcggtgggccgacttcccctcctcttccctctctccttcctttagcccgctggcgccggacacgctgcgcctcatctcttggggcgttcttccccgttggccaaccgtcgcatcccgtgcaactttggggtagtggccgtttagtgttgaatgttccccaccgagagcgcatggcttgggaagcgaggcgcgaacccggcccccgaagggccgccgtccgggagacggtgatgctgttgctgtgcctgggggtcccgaccggccgcccctacaacgtggacactgagagcgcgctgctttaccagggcccccacaacacgctgttcggctactcggtcgtgctgcacagccacggggcgaaccgatggctcctagtgggtgcgcccactgccaactggctcgccaacgcttcagtgatcaatcccggggcgatttacagatgcaggatcggaaagaatcccggccagacgtgcgaacagctccagctgggtagccctaatggagaaccttgtggaaagacttgtttggaagagagagacaatcagtggttgggggtcacactttccagacagccaggagaaaatggatccatcgtgacttgtgggcatagatggaaaaatatattttacataaagaatgaaaataagctccccactggtggttgctatggagtgccccctgatttacgaacagaactgagtaaaagaatagctccgtgttatcaagattatgtgaaaaaatttggagaaaattttgcatcatgtcaagctggaatatccagtttttacacaaaggatttaattgtgatgggggccccaggatcatcttactggactggctctctttttgtctacaatataactacaaataaatacaaggcttttttagacaaacaaaatcaagtaaaatttggaagttatttaggatattcagtcggagctggtcattttcggagccagcatactaccgaagtagtcggaggagctcctcaacatgagcagattggtaaggcatatatattcagcattgatgaaaaagaactaaatatcttacatgaaatgaaaggtaaaaagcttggatcgtactttggagcttctgtctgtgctgtggacctcaatgcagatggcttctcagatctgctcgtgggagcacccatgcagagcaccatcagagaggaaggaagagtgtttgtgtacatcaactctggctcgggagcagtaatgaatgcaatggaaacaaacctcgttggaagtgacaaatatgctgcaagatttggggaatctatagttaatcttggcgacattgacaatgatggctttgaagatgttgctatcggagctccacaagaagatgacttgcaaggtgctatttatatttacaatggccgtgcagatgggatctcgtcaaccttctcacagagaattgaaggacttcagatcagcaaatcgttaagtatgtttggacagtctatatcaggacaaattgatgcagataataatggctatgtagatgtagcagttggtgcttttcggtctgattctgctgtcttgctaaggacaagacctgtagtaattgttgacgcttctttaagccaccctgagtcagtaaatagaacgaaatttgactgtgttgaaaatggatggccttctgtgtgcatagatctaacactttgtttctcatataagggcaaggaagttccaggttacattgttttgttttataacatgagtttggatgtgaacagaaaggcagagtctccaccaagattctatttctcttctaatggaacttctgacgtgattacaggaagcatacaggtgtccagcagagaagctaactgtagaacacatcaagcatttatgcggaaagatgtgcgggacatcctcaccccaattcagattgaagctgcttaccaccttggtcctcatgtcatcagtaaacgaagtacagaggaattcccaccacttcagccaattcttcagcagaagaaagaaaaagacataatgaaaaaaacaataaactttgcaaggttttgtgcccatgaaaattgttctgctgatttacaggtttctgcaaagattgggtttttgaagccccatgaaaataaaacatatcttgctgttgggagtatgaagacattgatgttgaatgtgtccttgtttaatgctggagatgatgcatatgaaacgactctacatgtcaaactacccgtgggtctttatttcattaagattttagagctggaagagaagcaaataaactgtgaagtcacagataactctggcgtggtacaacttgactgcagtattggctatatatatgtagatcatctctcaaggatagatattagctttctcctggatgtgagctcactcagcagagcggaagaggacctcagtatcacagtgcatgctacctgtgaaaatgaagaggaaatggacaatctaaagcacagcagagtgactgtagcaatacctttaaaatatgaggttaagctgactgttcatgggtttgtaaacccaacttcatttgtgtatggatcaaatgatgaaaatgagcctgaaacgtgcatggtggagaaaatgaacttaactttccatgttatcaacactggcaatagtatggctcccaatgttagtgtggaaataatggtaccaaattcttttagcccccaaactgataagctgttcaacattttggatgtccagactactactggagaatgccactttgaaaattatcaaagagtgtgtgcattagagcagcaaaagagtgcaatgcagaccttgaaaggcatagtccggttcttgtccaagactgataagaggctattgtactgcataaaagctgatccacattgtttaaatttcttgtgtaattttgggaaaatggaaagtggaaaagaagccagtgttcatatccaactggaaggccggccatccattttagaaatggatgagacttcagcactcaagtttgaaataagagcaacaggttttccagagccaaatccaagagtaattgaactaaacaaggatgagaatgttgcgcatgttctactggaaggactacatcatcaaagacccaaacgttatttcaccatagtgattatttcaagtagcttgctacttggacttattgtacttctgttgatctcatatgttatgtggaaggctggcttctttaaaagacaatacaaatctatcctacaagaagaaaacagaagagacagttggagttatatcaacagtaaaagcaatgatgattaaggacttctttcaaattgagagaatggaaaacagactcaggttgtagtaaagaaatttaaaagacactgtttacaagaaaaaatgaattttgtttggacttcttttactcatgatcttgtgacatattatgtcttcatgcaaggggaaaatctcagcaatgattactctttgagatagaagaactgcaaaggtaataatacagccaaagataatctctcagcttttaaatgggtagagaaacactaaagcattcaatttattcaagaaaagtaagcccttgaagatatcttgaaatgaaagtataactgagttaaattatactggagaagtcttagacttgaaatactacttaccatatgtgcttgcctcagtaaaatgaaccccactgggtgggcagaggttcatttcaaatacatctttgatacttgttcaaaatatgttctttaaaaatataattttttagagagctgttcccaaattttctaacgagtggaccattatcactttaaagccctttatttataatacatttcctacgggctgtgttccaacaaccattttttttcagcagactatgaatattatagtattataggccaaactggcaaacttcagactgaacatgtacactggtttgagcttagtgaaattacttctggataattatttttttataattatggatttcaccatctttctttctgtatatatacatgtgtttttatgtaggtatatatttaccattcttcctatctattcttcctataacacacctttatcaagcatacccaggagtaatcttcaaatcttttgttatattctgaaacaaaagattgtgagtgttgcactttacctgatacacgctgatttagaaaatacagaaaccatacctcactaataactttaaaatcaaagctgtgcaaagactagggggcctatacttcatatgtattatgtactatgtaaaatattgactatcacacaactatttccttggatgtaattctttgttaccctttacaagtataagtgttaccttacatggaaacgaagaaacaaaattcataaatttaaattcataaatttagctgaaagatactgattcaatttgtatacagtgaatataaatgagacgacagcaaaattttcatgaaatgtaaaatatttttatagtttgttcatactatatgaggttctattttaaatgactttctggattttaaaaaatttctttaaatacaatcatttttgtaatatttattttatgcttatgatctagataattgcagaatatcattttatctgactctgccttcataagagagctgtggccgaattttgaacatctgttatagggagtgatcaaattagaaggcaatgtggaaaaacaattctgggaaagatttctttatatgaagtccctgccactagccagccatcctaattgatgaaagttatctgttcacaggcctgcagtgatggtgaggaatgttctgagatttgcgaaggcatttgagtagtgaaatgtaagcacaaaacctcctgaacccagagtgtgtatacacaggaataaactttatgacatttatgtatttttaaaaaactttgtatcgttataaaaaggctagtcattctttcaggagaacatctaggatcatagatgaaaaatcaagccccgatttagaactgtcttctccaggatggtctctaaggaaatttacatttggttctttcctactcagaactactcagaaacaactatatatttcaggttatctgagcacagtgaaagcagagtactatggttgtccaacacaggcctctcagatacaaggggaacacaattacatattgggctagattttgcccagttcaaaatagtatttgttatcaacttactttgttacttgtatcatgaattttaaaaccctaccactttaagaagacagggatgggttattcttttttggcaggtaggctatataactatgtgattttgaaatttaactgctctggattagggagcagtgaatcaaggcagacttatgaaatctgtattatatttgtaacagaatataggaaatttaacataattgatgagctcaaatcctgaaaaatgaaagaatccaaattatttcagaattatctaggttaaatattgatgtattatgatggttgcaaagtttttttgtgtgtccaataaacacattgtaaaaaaaagaatttgaattgatatctaaaaacagaatttgaattgatatttcatcttgacttttaaagccctagaggctaattgttagtaacatcaatttctattaggatatccgtttggccacacagcaggaggttagagcaatggagcattactgagttcctccccctgtcagatcagcagcagcattagattctcatagaagtgcgaaccatatggtgaactggtatgtgagggatctagagtgccatgttcctcaagagaatctaatgcctgatgatctgaggtggaacagttcatcctgaaaccattcccccatccacggaaaaattgtcttccatgaaactggtcccaaaaagggtggggaccacaggtttaaagcatggccacatttctttatattaaaattctagtttgtacatttcttttagaaacaattacatgttactttggaatcatttcttccatgcttcctccataaagactgataagtcttggatgcaatctgtaaagaaaatacattatttcatcaacttattttgttgtttttcacatacacctaataagtatggtacacaatgccaatgccaaatacaaattgataacaaacacagcattcccaacagagctgtaatctagaaaactgagaaggtctgattgataaatcatcaacaacaataattgctctaaaacctccttaactgacttccttgattgtccaatgctctccattacctctgtaaaacagtcagttatgcctctagaacacccatgtctagtgggcacccctgcatgcttcttctaaccactgagtgtcacaatgcctaccaagaatgcgtttgcaggttcctaaacctgtttataccagttgctatgtaaaattgttcccaagggaagttgaatgctctgtaaaggcctaataaaagcaaattactgaacaaaacatgttacagtaattatgagtgagaggaaactaagatggaaggataaaaatctaacactttactattcagatggctccactaaaagatttaagatcttgatccatttttaaaaatccaaaatggaagttgtagacattatctgtagtttatgcacaacaataaattagaaagccaatgtagacacgcataaccaaagaaaatgccttgggtctacataacagttgaataaatgtaaagttgcttttaaaaaaaaaaaaaaaaaa

SEQ ID NO: 158 - DNA, 4267 bp, Homo sapiens
attcgcctctgggaggtttaggaagcggctccgggtcggtggccccaggacagggaagagcgggcgctatggggagccggacgccagagtcccctctccacgccgtgcagctgcgctggggcccccggcgccgacccccgctgctgccgctgctgttgctgctgctgccgccgccacccagggtcgggggcttcaacttagacgcggaggccccagcagtactctcggggcccccgggctccttcttcggattctcagtggagttttaccggccgggaacagacggggtcagtgtgctggtgggagcacccaaggctaataccagccagccaggagtgctgcagggtggtgctgtctacctctgtccttggggtgccagccccacacagtgcacccccattgaatttgacagcaaaggctctcggctcctggagtcctcactgtccagctcagagggagaggagcctgtggagtacaagtccttgcagtggttcggggcaacagttcgagcccatggctcctccatcttggcatgcgctccactgtacagctggcgcacagagaaggagccactgagcgaccccgtgggcacctgctacctctccacagataacttcacccgaattctggagtatgcaccctgccgctcagatttcagctgggcagcaggacagggttactgccaaggaggcttcagtgccgagttcaccaagactggccgtgtggttttaggtggaccaggaagctatttctggcaaggccagatcctgtctgccactcaggagcagattgcagaatcttattaccccgagtacctgatcaacctggttcaggggcagctgcagactcgccaggccagttccatctatgatgacagctacctaggatactctgtggctgttggtgaattcagtggtgatgacacagaagactttgttgctggtgtgcccaaagggaacctcacttacggctatgtcaccatccttaatggctcagacattcgatccctctacaacttctcaggggaacagatggcctcctactttggctatgcagtggccgccacagacgtcaatggggacgggctggatgacttgctggtgggggcacccctgctcatggatcggacccctgacgggcggcctcaggaggtgggcagggtctacgtctacctgcagcacccagccggcatagagcccacgcccacccttaccctcactggccatgatgagtttggccgatttggcagctccttgacccccctgggggacctggaccaggatggctacaatgatgtggccatcggggctccctttggtggggagacccagcagggagtagtgtttgtatttcctgggggcccaggagggctgggctctaagccttcccaggttctgcagcccctgtgggcagccagccacaccccagacttctttggctctgcccttcgaggaggccgagacctggatggcaatggatatcctgatctgattgtggggtcctttggtgtggacaaggctgtggtatacaggggccgccccatcgtgtccgctagtgcctccctcaccatcttccccgccatgttcaacccagaggagcggagctgcagcttagaggggaaccctgtggcctgcatcaaccttagcttctgcctcaatgcttctggaaaacacgttgctgactccattggtttcacagtggaacttcagctggactggcagaagcagaagggaggggtacggcgggcactgttcctggcctccaggcaggcaaccctgacccagaccctgctcatccagaatggggctcgagaggattgcagagagatgaagatctacctcaggaacgagtcagaatttcgagacaaactctcgccgattcacatcgctctcaacttctccttggacccccaagccccagtggacagccacggcctcaggccagccctacattatcagagcaagagccggatagaggacaaggctcagatcttgctggactgtggagaagacaacatctgtgtgcctgacctgcagctggaagtgtttggggagcagaaccatgtgtacctgggtgacaagaatgccctgaacctcactttccatgcccagaatgtgggtgagggtggcgcctatgaggctgagcttcgggtcaccgcccctccagaggctgagtactcaggactcgtcagacacccagggaacttctccagcctgagctgtgactactttgccgtgaaccagagccgcctgctggtgtgtgacctgggcaaccccatgaaggcaggagccagtctgtggggtggccttcggtttacagtccctcatctccgggacactaagaaaaccatccagtttgacttccagatcctcagcaagaatctcaacaactcgcaaagcgacgtggtttcctttcggctctccgtggaggctcaggcccaggtcaccctgaacggtgtctccaagcctgaggcagtgctattcccagtaagcgactggcatccccgagaccagcctcagaaggaggaggacctgggacctgctgtccaccatgtctatgagctcatcaaccaaggccccagctccattagccagggtgtgctggaactcagctgtccccaggctctggaaggtcagcagctcctatatgtgaccagagttacgggactcaactgcaccaccaatcaccccattaacccaaagggcctggagttggatcccgagggttccctgcaccaccagcaaaaacgggaagctccaagccgcagctctgcttcctcgggacctcagatcctgaaatgcccggaggctgagtgtttcaggctgcgctgtgagctcgggcccctgcaccaacaagagagccaaagtctgcagttgcatttccgagtctgggccaagactttcttgcagcgggagcaccagccatttagcctgcagtgtgaggctgtgtacaaagccctgaagatgccctaccgaatcctgcctcggcagctgccccaaaaagagcgtcaggtggccacagctgtgcaatggaccaaggcagaaggcagctatggcgtcccactgtggatcatcatcctagccatcctgtttggcctcctgctcctaggtctactcatctacatcctctacaagcttggattcttcaaacgctccctcccatatggcaccgccatggaaaaagctcagctcaagcctccagccacctctgatgcctgagtcctcccaatttcagactcccattcctgaagaaccagtccccccaccctcattctactgaaaaggaggggtctgggtacttcttgaaggtgctgacggccagggagaagctcctctccccagcccagagacatacttgaagggccagagccaggggggtgaggagctggggatccctcccccccatgcactgtgaaggacccttgtttacacataccctcttcatggatgggggaactcagatccagggacagaggccccagcctccctgaagcctttgcattttggagagtttcctgaaacaacttggaaagataactaggaaatccattcacagttctttgggccagacatgccacaaggacttcctgtccagctccaacctgcaaagatctgtcctcagccttgccagagatccaaaagaagcccccagctaagaacctggaacttggggagttaagacctggcagctctggacagccccaccctggtgggccaacaaagaacactaactatgcatggtgccccaggaccagctcaggacagatgccacacaaggatagatgctggcccagggcccagagcccagctccaaggggaatcagaactcaaatggggccagatccagcctggggtctggagttgatctggaacccagactcagacattggcacctaatccaggcagatccaggactatatttgggcctgctccagacctgatcctggaggcccagttcaccctgatttaggagaagccaggaatttcccaggaccctgaaggggccatgatggcaacagatctggaacctcagcctggccagacacaggccctccctgttccccagagaaaggggagcccactgtcctgggcctgcagaatttgggttctgcctgccagctgcactgatgctgcccctcatctctctgcccaacccttccctcaccttggcaccagacacccaggacttatttaaactctgttgcaagtgcaataaatctgacccagtgcccccactgaccagaactagaaaaaaaaaaaaaaaaaaa

SEQ ID NO: 159 - DNA, 3879 bp, Homo sapiens
atcagacgcgcagaggaggcggggccgcggctggtttcctgccggggggcggctctgggccgccgagtcccctcctcccgcccctgaggaggaggagccgccgccacccgccgcgcccgacacccgggaggccccgccagcccgcgggagaggcccagcgggagtcgcggaacagcaggcccgagcccaccgcgccgggccccggacgccgcgcggaaaagatgaatttacaaccaattttctggattggactgatcagttcagtttgctgtgtgtttgctcaaacagatgaaaatagatgtttaaaagcaaatgccaaatcatgtggagaatgtatacaagcagggccaaattgtgggtggtgcacaaattcaacatttttacaggaaggaatgcctacttctgcacgatgtgatgatttagaagccttaaaaaagaagggttgccctccagatgacatagaaaatcccagaggctccaaagatataaagaaaaataaaaatgtaaccaaccgtagcaaaggaacagcagagaagctcaagccagaggatattactcagatccaaccacagcagttggttttgcgattaagatcaggggagccacagacatttacattaaaattcaagagagctgaagactatcccattgacctctactaccttatggacctgtcttactcaatgaaagacgatttggagaatgtaaaaagtcttggaacagatctgatgaatgaaatgaggaggattacttcggacttcagaattggatttggctcatttgtggaaaagactgtgatgccttacattagcacaacaccagctaagctcaggaacccttgcacaagtgaacagaactgcaccagcccatttagctacaaaaatgtgctcagtcttactaataaaggagaagtatttaatgaacttgttggaaaacagcgcatatctggaaatttggattctccagaaggtggtttcgatgccatcatgcaagttgcagtttgtggatcactgattggctggaggaatgttacacggctgctggtgttttccacagatgccgggtttcactttgctggagatgggaaacttggtggcattgttttaccaaatgatggacaatgtcacctggaaaataatatgtacacaatgagccattattatgattatccttctattgctcaccttgtccagaaactgagtgaaaataatattcagacaatttttgcagttactgaagaatttcagcctgtttacaaggagctgaaaaacttgatccctaagtcagcagtaggaacattatctgcaaattctagcaatgtaattcagttgatcattgatgcatacaattccctttcctcagaagtcattttggaaaacggcaaattgtcagaaggcgtaacaataagttacaaatcttactgcaagaacggggtgaatggaacaggggaaaatggaagaaaatgttccaatatttccattggagatgaggttcaatttgaaattagcataacttcaaataagtgtccaaaaaaggattctgacagctttaaaattaggcctctgggctttacggaggaagtagaggttattcttcagtacatctgtgaatgtgaatgccaaagcgaaggcatccctgaaagtcccaagtgtcatgaaggaaatgggacatttgagtgtggcgcgtgcaggtgcaatgaagggcgtgttggtagacattgtgaatgcagcacagatgaagttaacagtgaagacatggatgcttactgcaggaaagaaaacagttcagaaatctgcagtaacaatggagagtgcgtctgcggacagtgtgtttgtaggaagagggataatacaaatgaaatttattctggcaaattctgcgagtgtgataatttcaactgtgatagatccaatggcttaatttgtggaggaaatggtgtttgcaagtgtcgtgtgtgtgagtgcaaccccaactacactggcagtgcatgtgactgttctttggatactagtacttgtgaagccagcaacggacagatctgcaatggccggggcatctgcgagtgtggtgtctgtaagtgtacagatccgaagtttcaagggcaaacgtgtgagatgtgtcagacctgccttggtgtctgtgctgagcataaagaatgtgttcagtgcagagccttcaataaaggagaaaagaaagacacatgcacacaggaatgttcctattttaacattaccaaggtagaaagtcgggacaaattaccccagccggtccaacctgatcctgtgtcccattgtaaggagaaggatgttgacgactgttggttctattttacgtattcagtgaatgggaacaacgaggtcatggttcatgttgtggagaatccagagtgtcccactggtccagacatcattccaattgtagctggtgtggttgctggaattgttcttattggccttgcattactgctgatatggaagcttttaatgataattcatgacagaagggagtttgctaaatttgaaaaggagaaaatgaatgccaaatgggacacgggtgaaaatcctatttataagagtgccgtaacaactgtggtcaatccgaagtatgagggaaaatgagtactgcccgtgcaaatcccacaacactgaatgcaaagtagcaatttccatagtcacagttaggtagctttagggcaatattgccatggttttactcatgtgcaggttttgaaaatgtacaatatgtataatttttaaaatgttttattattttgaaaataatgttgtaattcatgccagggactgacaaaagacttgagacaggatggttactcttgtcagctaaggtcacattgtgcctttttgaccttttcttcctggactattgaaatcaagcttattggattaagtgatatttctatagcgattgaaagggcaatagttaaagtaatgagcatgatgagagtttctgttaatcatgtattaaaactgatttttagctttacaaatatgtcagtttgcagttatgcagaatccaaagtaaatgtcctgctagctagttaaggattgttttaaatctgttattttgctatttgcctgttagacatgactgatgacatatctgaaagacaagtatgttgagagttgctggtgtaaaatacgtttgaaatagttgatctacaaaggccatgggaaaaattcagagagttaggaaggaaaaaccaatagctttaaaacctgtgtgccattttaagagttacttaatgtttggtaacttttatgccttcactttacaaattcaagccttagataaaagaaccgagcaattttctgctaaaaagtccttgatttagcactatttacatacaggccatactttacaaagtatttgctgaatggggaccttttgagttgaatttattttattatttttattttgtttaatgtctggtgctttctgtcacctcttctaatcttttaatgtatttgtttgcaattttggggtaagactttttttatgagtactttttctttgaagttttagcggtcaatttgcctttttaatgaacatgtgaagttatactgtggctatgcaacagctctcacctacgcgagtcttactttgagttagtgccataacagaccactgtatgtttacttctcaccatttgagttgcccatcttgtttcacactagtcacattcttgttttaagtgcctttagttttaacagttcactttttacagtgctatttactgaagttatttattaaatatgcctaaaatacttaaatcggatgtcttgactctgatgtattttatcaggttgtgtgcatgaaatttttatagattaaagaagttgaggaaaagcaaaaaaaaaa

SEQ ID NO: 160 - DNA, 4894 bp, Homo sapiens
cgccgcgggaggcggacgagatgcgagcgcggccgcggccccggccgctctgggcgactgtgctggcgctgggggcgctggcgggcgttggcgtaggagggcccaacatctgtaccacgcgaggtgtgagctcctgccagcagtgcctggctgtgagccccatgtgtgcctggtgctctgatgaggccctgcctctgggctcacctcgctgtgacctgaaggagaatctgctgaaggataactgtgccccagaatccatcgagttcccagtgagtgaggcccgagtactagaggacaggcccctcagcgacaagggctctggagacagctcccaggtcactcaagtcagtccccagaggattgcactccggctccggccagatgattcgaagaatttctccatccaagtgcggcaggtggaggattaccctgtggacatctactacttgatggacctgtcttactccatgaaggatgatctgtggagcatccagaacctgggtaccaagctggccacccagatgcgaaagctcaccagtaacctgcggattggcttcggggcatttgtggacaagcctgtgtcaccatacatgtatatctccccaccagaggccctcgaaaacccctgctatgatatgaagaccacctgcttgcccatgtttggctacaaacacgtgctgacgctaactgaccaggtgacccgcttcaatgaggaagtgaagaagcagagtgtgtcacggaaccgagatgccccagagggtggctttgatgccatcatgcaggctacagtctgtgatgaaaagattggctggaggaatgatgcatcccacttgctggtgtttaccactgatgccaagactcatatagcattggacggaaggctggcaggcattgtccagcctaatgacgggcagtgtcatgttggtagtgacaatcattactctgcctccactaccatggattatccctctttggggctgatgactgagaagctatcccagaaaaacatcaatttgatctttgcagtgactgaaaatgtagtcaatctctatcagaactatagtgagctcatcccagggaccacagttggggttctgtccatggattccagcaatgtcctccagctcattgttgatgcttatgggaaaatccgttctaaagtagagctggaagtgcgtgacctccctgaagagttgtctctatccttcaatgccacctgcctcaacaatgaggtcatccctggcctcaagtcttgtatgggactcaagattggagacacggtgagcttcagcattgaggccaaggtgcgaggctgtccccaggagaaggagaagtcctttaccataaagcccgtgggcttcaaggacagcctgatcgtccaggtcacctttgattgtgactgtgcctgccaggcccaagctgaacctaatagccatcgctgcaacaatggcaatgggacctttgagtgtggggtatgccgttgtgggcctggctggctgggatcccagtgtgagtgctcagaggaggactatcgcccttcccagcaggacgaatgcagcccccgggagggtcagcccgtctgcagccagcggggcgagtgcctctgtggtcaatgtgtctgccacagcagtgactttggcaagatcacgggcaagtactgcgagtgtgacgacttctcctgtgtccgctacaagggggagatgtgctcaggccatggccagtgcagctgtggggactgcctgtgtgactccgactggaccggctactactgcaactgtaccacgcgtactgacacctgcatgtccagcaatgggctgctgtgcagcggccgcggcaagtgtgaatgtggcagctgtgtctgtatccagccgggctcctatggggacacctgtgagaagtgccccacctgcccagatgcctgcacctttaagaaagaatgtgtggagtgtaagaagtttgaccggggagccctacatgacgaaaatacctgcaaccgttactgccgtgacgagattgagtcagtgaaagagcttaaggacactggcaaggatgcagtgaattgtacctataagaatgaggatgactgtgtcgtcagattccagtactatgaagattctagtggaaagtccatcctgtatgtggtagaagagccagagtgtcccaagggccctgacatcctggtggtcctgctctcagtgatgggggccattctgctcattggccttgccgccctgctcatctggaaactcctcatcaccatccacgaccgaaaagaattcgctaaatttgaggaagaacgcgccagagcaaaatgggacacagccaacaacccactgtataaagaggccacgtctaccttcaccaatatcacgtaccggggcacttaatgataagcagtcatcctcagatcattatcagcctgtgccacgattgcaggagtccctgccatcatgtttacagaggacagtatttgtggggagggatttggggctcagagtggggtaggttgggagaatgtcagtatgtggaagtgtgggtctgtgtgtgtgtatgtgggggtctgtgtgtttatgtgtgtgtgttgtgtgtgggagtgtgtaatttaaaattgtgatgtgtcctgataagctgagctccttagcctttgtcccagaatgcctcctgcagggattcttcctgcttagcttgagggtgactatggagctgagcaggtgttcttcattacctcagtgagaagccagctttcctcatcaggccattgtccctgaagagaagggcagggctgaggcctctcattccagaggaagggacaccaagccttggctctaccctgagttcataaatttatggttctcaggcctgactctcagcagctatggtaggaactgctgggcttggcagcccgggtcatctgtacctctgcctcctttcccctccctcaggccgaaggaggagtcagggagagctgaactattagagctgcctgtgccttttgccatcccctcaacccagctatggttctctcgcaagggaagtccttgcaagctaattctttgacctgttgggagtgaggatgtctgggccactcaggggtcattcatggcctgggggatgtaccagcatctcccagttcataatcacaacccttcagatttgccttattggcagctctactctggaggtttgtttagaagaagtgtgtcacccttaggccagcaccatctctttacctcctaattccacaccctcactgctgtagacatttgctatgagctggggatgtctctcatgaccaaatgcttttcctcaaagggagagagtgctattgtagagccagaggtctggccctatgcttccggcctcctgtccctcatccatagcacctccacatacctggccctgtgccttggtgtgctgtatccatccatggggctgattgtatttaccttctacctcttggctgccttgtgaaggaattattcccatgagttggctgggaataagtgccaggatggaatgatgggtcagttgtatcagcacgtgtggcctgttcttctatgggttggacaacctcattttaactcagtctttaatctgagaggccacagtgcaattttattttatttttctcatgatgaggttttcttaacttaaaagaacatgtatataaacatgcttgcattatatttgtaaatttatgtgatggcaaagaaggagagcataggaaaccacacagacttgggcagggtacagacactcccacttggcatcattcacagcaagtcactggccagtggctggatctgtgaggggctctctcatgatagaaggctatggggatagatgtgtggacacattggacctttcctgaggaagagggactgttcttttgtcccagaaaagcagtggctccattggtgttgacatacatccaacattaaaagccacccccaaatgcccaagaaaaaaagaaagacttatcaacatttgttccatgagcagaaaactggagctctggcctcagtgttacagctaaataatctttaattaaggcaagtcactttcttcttcttaaagctgttttctagtttgagaaatgatgggattttagcagccagtcttgaaggtctctttcagtatcaacattctaagatgctgggacttactgtgtcatcaaatgtgcggttaagattctctgggatattgatactgtttgtgtttttagttgggagatctgagagacctggctttggcaagagcagatgtcattccatatcacctttctcaatgaaagtctcattctatcctctctccaaacccgttttccaacatttgttaatagttacgtctctcctgatgtagcacttaagcttcatttagttattatttctttcttcactttgcacacatttgcatccacatattagggaagaggaatccataagtagctgaaatatctattctgtattattgtgttaacattgagaataagccttggaattagatatggggcaatgactgagccctgtctcacccatggattactccttactgtagggaatggcagtatggtagagggataaatagggggcggggagggatagtcatggatccaagaagtccttagaaatagtggcagggaacaggtgtggaagctcatgcctgtaattataaccttcagctactaagacaggtgtggtggctcacgcctgtgattataatcttcagttactaagacagagtccatgagagtgttaatgggacattttctttagataagatgttttatatgaagaaactgtatcaaagggggaagaaaatgtatttaacaggtgaatcaaatcaggaatcttgtctgagctactggaatgaagttcacaggtcttgaagacca

SEQ ID NO: 161 - DNA, 4392 bp, Homo sapiens
gccgccgagcggagccagcccctcccctacccggagcagcccgctggggccgtcccgagcggcgacacactaggagtcccggccggccagccagggcagccgcggtcccgggactcggccgtgagtgctgcgggacggatggtggcggcggggcgcgggccagcgcgggcgccgtgagccggagctgcgcgcggggcatgcggctgcggcccccggccctcggcccccgcgctccggccccagccccggccgccggcccccgcggagtgcagcgaccgcgccgccgctgagggaggcgccccaccatgccgcgggccccggcgccgctgtacgcctgcctcctggggctctgcgcgctcctgccccggctcgcaggtctcaacatatgcactagtggaagtgccacctcatgtgaagaatgtctgctaatccacccaaaatgtgcctggtgctccaaagaggacttcggaagcccacggtccatcacctctcggtgtgatctgagggcaaaccttgtcaaaaatggctgtggaggtgagatagagagcccagccagcagcttccatgtcctgaggagcctgcccctcagcagcaagggttcgggctctgcaggctgggacgtcattcagatgacaccacaggagattgccgtgaacctccggcccggtgacaagaccaccttccagctacaggttcgccaggtggaggactatcctgtggacctgtactacctgatggacctctccctgtccatgaaggatgacttggacaatatccggagcctgggcaccaaactcgcggaggagatgaggaagctcaccagcaacttccggttgggatttgggtcttttgttgataaggacatctctcctttctcctacacggcaccgaggtaccagaccaatccgtgcattggttacaagttgtttccaaattgcgtcccctcctttgggttccgccatctgctgcctctcacagacagagtggacagcttcaatgaggaagttcggaaacagagggtgtcccggaaccgagatgcccctgaggggggctttgatgcagtactccaggcagccgtctgcaaggagaagattggctggcgaaaggatgcactgcatttgctggtgttcacaacagatgatgtgccccacatcgcattggatggaaaattgggaggcctggtgcagccacacgatggccagtgccacctgaacgaggccaacgagtacactgcatccaaccagatggactatccatcccttgccttgcttggagagaaattggcagagaacaacatcaacctcatctttgcagtgacaaaaaaccattatatgctgtacaagaattttacagccctgatacctggaacaacggtggagattttagatggagactccaaaaatattattcaactgattattaatgcatacaatagtatccggtctaaagtggagttgtcagtctgggatcagcctgaggatcttaatctcttctttactgctacctgccaagatggggtatcctatcctggtcagaggaagtgtgagggtctgaagattggggacacggcatcttttgaagtatcattggaggcccgaagctgtcccagcagacacacggagcatgtgtttgccctgcggccggtgggattccgggacagcctggaggtgggggtcacctacaactgcacgtgcggctgcagcgtggggctggaacccaacagcgccaggtgcaacgggagcgggacctatgtctgcggcctgtgtgagtgcagccccggctacctgggcaccaggtgcgagtgccaggatggggagaaccagagcgtgtaccagaacctgtgccgggaggcagagggcaagccactgtgcagcgggcgtggggactgcagctgcaaccagtgctcctgcttcgagagcgagtttggcaagatctatgggcctttctgtgagtgcgacaacttctcctgtgccaggaacaagggagtcctctgctcaggccatggcgagtgtcactgcggggaatgcaagtgccatgcaggttacatcggggacaactgtaactgctcgacagacatcagcacatgccggggcagagatggccagatctgcagcgagcgtgggcactgtctctgtgggcagtgccaatgcacggagccgggggcctttggggagatgtgtgagaagtgccccacctgcccggatgcatgcagcaccaagagagattgcgtcgagtgcctgctgctccactctgggaaacctgacaaccagacctgccacagcctatgcagggatgaggtgatcacatgggtggacaccatcgtgaaagatgaccaggaggctgtgctatgtttctacaaaaccgccaaggactgcgtcatgatgttcacctatgtggagctccccagtgggaagtccaacctgaccgtcctcagggagccagagtgtggaaacacccccaacgccatgaccatcctcctggctgtggtcggtagcatcctccttgttgggcttgcactcctggctatctggaagctgcttgtcaccatccacgaccggagggagtttgcaaagtttcagagcgagcgatccagggcccgctatgaaatggcttcaaatccattatacagaaagcctatctccacgcacactgtggacttcaccttcaacaagttcaacaaatcctacaatggcactgtggactgatgtttccttctccgaggggctggagcggggatctgatgaaaaggtcagactgaaacgccttgcacggctgctcggcttgatcacagctccctaggtaggcaccacagagaagaccttctagtgagcctgggccaggagcccacagtgcctgtacaggaaggtgcctggccatgtcacctggctgctaggccagagccatgccaggctgcgtccctccgagcttgggataaagcaaggggaccttggcgctctcagctttccctgccacatccagcttgttgtcccaatgaaatactgagatgctgggctgtctctcccttccaggaatgctgggcccccagcctggccagacaagaagactgtcaggaagggtcggagtctgtaaaaccagcatacagtttggcttttttcacattgatcatttttatatgaaataaaaagatcctgcatttatggtgtagttctgagtcctgagacttttctgcgtgatggctatgccttgcacacaggtgttggtgatggggctgttgagatgcctgttgaaggtacatcgtttgcaaatgtcagtttcctctcctgtccgtgtttgtttagtacttttataatgaaaagaaacaagattgtttgggattggaagtaaagattaaaaccaaaagaatttgtgtttgtctgatactctctgtgtgtttctttctttctgagcggacttaaaatggtgcccccagtggggattgaagcggccgtgtacttcctcagggatgggacacaggctggtctgatactccagactgcagcttgtcaagtaagcatgaggtgctcggggcagtgagggctgtgcaagggggaacactgagcagatacctttggccccttccagcttttactgacagagagttccaggctagacaccataaaaaccaccccttgttctgaggggctgaggctggaaatagattgtacagacaagcaagggttgagtggtggttcccacacgaagtcatctcttaatcatcattagcaatagcagttcccttccaaggcctcccctcactcccgaaacacttacgtcccatgcaggcccaatgcaaaaaaacacatttgagcttttttcccgcagggccatgaagtccccttaagttcccatatctaagatggttgactgaccctctccccttatgtacagaagaggaaactgattctcagagaggggaagtggcttgcccgagtgtttgttaggaggttactgaatgacaaactgttcctaagaccccatctcatgctggccagagggccagcctcctcattcctgcttgctcttagaaaatctttcactgatcattttttgtcactggaataacttcaaggttattatgctttcattccaaatggatctgtcctcagctctggacccaattccccttacttcattttggcaaacactaagtcaaatagtgaaatgcctgtcactacatagaacctattacctggggcaaatacgaacagattgagtttccttcatcttgtgtaaatatgatgaaacagagacctggtaacttggtgacactgttaaaccctttttgggataaagccaaatgtaaatgaaaacattaaacagataaattgtggtgttgagacttttctgaattgagaaaaataaatgtaattttggaagaaaaaaaaaaaaaaa

SEQ ID NO: 162 - DNA, 2878 bp, Homo sapiens
aaatcttccccaccctggggagtgtcacttcctcctctgccgtctcccagatcagtacacaaaggctgctgctgccgccagaggaaggactgctctgcacgcacctatgtggaaactaaagcccagagagaaagtctgacttgccccacagccagtgagtgactgcagcagcaccagaatctggtctgtttcctgtttggctcttctaccactacggcttgggatctcgggcatggtggctttgccaatggtccttgttttgctgctggtcctgagcagaggtgagagtgaattggacgccaagatcccatccacaggggatgccacagaatggcggaatcctcacctgtccatgctggggtcctgccagccagccccctcctgccagaagtgcatcctctcacaccccagctgtgcatggtgcaagcaactgaacttcaccgcgtcgggagaggcggaggcgcggcgctgcgcccgacgagaggagctgctggctcgaggctgcccgctggaggagctggaggagccccgcggccagcaggaggtgctgcaggaccagccgctcagccagggcgcccgcggagagggtgccacccagctggcgccgcagcgggtccgggtcacgctgcggcctggggagccccagcagctccaggtccgcttccttcgtgctgagggatacccggtggacctgtactaccttatggacctgagctactccatgaaggacgacctggaacgcgtgcgccagctcgggcacgctctgctggtccggctgcaggaagtcacccattctgtgcgcattggttttggttcctttgtggacaaaacggtgctgccctttgtgagcacagtaccctccaaactgcgccacccctgccccacccggctggagcgctgccagtcaccattcagctttcaccatgtgctgtccctgacgggggacgcacaagccttcgagcgggaggtggggcgccagagtgtgtccggcaatctggactcgcctgaaggtggcttcgatgccattctgcaggctgcactctgccaggagcagattggctggagaaatgtgtcccggctgctggtgttcacttcagacgacacattccatacagctggggacgggaagttgggcggcattttcatgcccagtgatgggcactgccacttggacagcaatggcctctacagtcgcagcacagagtttgactacccttctgtgggtcaggtagcccaggccctctctgcagcaaatatccagcccatctttgctgtcaccagtgccgcactgcctgtctaccaggagctgagtaaactgattcctaagtctgcagttggggagctgagtgaggactccagcaacgtggtacagctcatcatggatgcttataatagcctgtcttccaccgtgacccttgaacactcttcactccctcctggggtccacatttcttacgaatcccagtgtgagggtcctgagaagagggagggtaaggctgaggatcgaggacagtgcaaccacgtccgaatcaaccagacggtgactttctgggtttctctccaagccacccactgcctcccagagccccatctcctgaggctccgggcccttggcttctcagaggagctgattgtggagttgcacacgctgtgtgactgtaattgcagtgacacccagccccaggctccccactgcagtgatggccagggacacctacaatgtggtgtatgcagctgtgcccctggccgcctaggtcggctctgtgagtgctctgtggcagagctgtcctccccagacctggaatctgggtgccgggctcccaatggcacagggcccctgtgcagtggaaagggtcactgtcaatgtggacgctgcagctgcagtggacagagctctgggcatctgtgcgagtgtgacgatgccagctgtgagcgacatgagggcatcctctgcggaggctttggtcgctgccaatgtggagtatgtcactgtcatgccaaccgcacgggcagagcatgcgaatgcagtggggacatggacagttgcatcagtcccgagggagggctctgcagtgggcatggacgctgcaaatgcaaccgctgccagtgcttggacggctactatggtgctctatgcgaccaatgcccaggctgcaagacaccatgcgagagacaccgggactgtgcagagtgtggggccttcaggactggcccactggccaccaactgcagtacagcttgtgcccataccaatgtgaccctggccttggcccctatcttggatgatggctggtgcaaagagcggaccctggacaaccagctgttcttcttcttggtggaggatgacgccagaggcacggtcgtgctcagagtgagaccccaagaaaagggagcagaccacacgcaggccattgtgctgggctgcgtagggggcatcgtggcagtggggctggggctggtcctggcttaccggctctcggtggaaatctatgaccgccgggaatacagtcgctttgagaaggagcagcaacaactcaactggaagcaggacagtaatcctctctacaaaagtgccatcacgaccaccatcaatcctcgctttcaagaggcagacagtcccactctctgaaggagggagggacacttacccaaggctcttctccttggaggacagtgggaactggagggtgagaggaagggtgggtctgtaagaccttggtaggggactaattcactggcgaggtgcggccaccaccctacttcattttcagagtgacacccaagagggctgcttcccatgcctgcaaccttgcatccatctgggctaccccacccaagtatacaataaagtcttacctcagaccacaaaaaaaaaaaa

SEQ ID NO: 163 - DNA, 3875 bp, Homo sapiens
agctgttcttggctgacttcacatcaaaactcctatactgacctgagacagaggcagcagtgatacccacctgagagatcctgtgtttgaacaactgcttcccaaaacggaaagtatttcaagcctaaacctttgggtgaaaagaactcttgaagtcatgattgcttcacagtttctctcagctctcactttggtgcttctcattaaagagagtggagcctggtcttacaacacctccacggaagctatgacttatgatgaggccagtgcttattgtcagcaaaggtacacacacctggttgcaattcaaaacaaagaagagattgagtacctaaactccatattgagctattcaccaagttattactggattggaatcagaaaagtcaacaatgtgtgggtctgggtaggaacccagaaacctctgacagaagaagccaagaactgggctccaggtgaacccaacaataggcaaaaagatgaggactgcgtggagatctacatcaagagagaaaaagatgtgggcatgtggaatgatgagaggtgcagcaagaagaagcttgccctatgctacacagctgcctgtaccaatacatcctgcagtggccacggtgaatgtgtagagaccatcaataattacacttgcaagtgtgaccctggcttcagtggactcaagtgtgagcaaattgtgaactgtacagccctggaatcccctgagcatggaagcctggtttgcagtcacccactgggaaacttcagctacaattcttcctgctctatcagctgtgataggggttacctgccaagcagcatggagaccatgcagtgtatgtcctctggagaatggagtgctcctattccagcctgcaatgtggttgagtgtgatgctgtgacaaatccagccaatgggttcgtggaatgtttccaaaaccctggaagcttcccatggaacacaacctgtacatttgactgtgaagaaggatttgaactaatgggagcccagagccttcagtgtacctcatctgggaattgggacaacgagaagccaacgtgtaaagctgtgacatgcagggccgtccgccagcctcagaatggctctgtgaggtgcagccattcccctgctggagagttcaccttcaaatcatcctgcaacttcacctgtgaggaaggcttcatgttgcagggaccagcccaggttgaatgcaccactcaagggcagtggacacagcaaatcccagtttgtgaagctttccagtgcacagccttgtccaaccccgagcgaggctacatgaattgtcttcctagtgcttctggcagtttccgttatgggtccagctgtgagttctcctgtgagcagggttttgtgttgaagggatccaaaaggctccaatgtggccccacaggggagtgggacaacgagaagcccacatgtgaagctgtgagatgcgatgctgtccaccagcccccgaagggtttggtgaggtgtgctcattcccctattggagaattcacctacaagtcctcttgtgccttcagctgtgaggagggatttgaattacatggatcaactcaacttgagtgcacatctcagggacaatggacagaagaggttccttcctgccaagtggtaaaatgttcaagcctggcagttccgggaaagatcaacatgagctgcagtggggagcccgtgtttggcactgtgtgcaagttcgcctgtcctgaaggatggacgctcaatggctctgcagctcggacatgtggagccacaggacactggtctggcctgctacctacctgtgaagctcccactgagtccaacattcccttggtagctggactttctgctgctggactctccctcctgacattagcaccatttctcctctggcttcggaaatgcttacggaaagcaaagaaatttgttcctgccagcagctgccaaagccttgaatcagatggaagctaccaaaagccttcttacatcctttaagttcaaaagaatcagaaacaggtgcatctggggaactagagggatacactgaagttaacagagacagataactctcctcgggtctctggcccttcttgcctactatgccagatgcctttatggctgaaaccgcaacacccatcaccacttcaatagatcaaagtccagcaggcaaggacggccttcaactgaaaagactcagtgttccctttcctactctcaggatcaagaaagtgttggctaatgaagggaaaggatattttcttccaagcaaaggtgaagagaccaagactctgaaatctcagaattccttttctaactctcccttgctcgctgtaaaatcttggcacagaaacacaatattttgtggctttctttcttttgcccttcacagtgtttcgacagctgattacacagttgctgtcataagaatgaataataattatccagagtttagaggaaaaaaatgactaaaaatattataacttaaaaaaatgacagatgttgaatgcccacaggcaaatgcatggagggttgttaatggtgcaaatcctactgaatgctctgtgcgagggttactatgcacaatttaatcactttcatccctatgggattcagtgcttcttaaagagttcttaaggattgtgatatttttacttgcattgaatatattataatcttccatacttcttcattcaatacaagtgtggtagggacttaaaaaacttgtaaatgctgtcaactatgatatggtaaaagttacttattctagattaccccctcattgtttattaacaaattatgttacatctgttttaaatttatttcaaaaagggaaactattgtcccctagcaaggcatgatgttaaccagaataaagttctgagtgtttttactacagttgttttttgaaaacatggtagaattggagagtaaaaactgaatggaaggtttgtatattgtcagatattttttcagaaatatgtggtttccacgatgaaaaacttccatgaggccaaacgttttgaactaataaaagcataaatgcaaacacacaaaggtataattttatgaatgtctttgttggaaaagaatacagaaagatggatgtgctttgcattcctacaaagatgtttgtcagatatgatatgtaaacataattcttgtatattatggaagattttaaattcacaatagaaactcaccatgtaaaagagtcatctggtagatttttaacgaatgaagatgtctaatagttattccctatttgttttcttctgtatgttagggtgctctggaagagaggaatgcctgtgtgagcaagcatttatgtttatttataagcagatttaacaattccaaaggaatctccagttttcagttgatcactggcaatgaaaaattctcagtcagtaattgccaaagctgctctagccttgaggagtgtgagaatcaaaactctcctacacttccattaacttagcatgtgttgaaaaaaaagtttcagagaagttctggctgaacactggcaacaacaaagccaacagtcaaaacagagatgtgataaggatcagaacagcagaggttcttttaaaggggcagaaaaactctgggaaataagagagaacaactactgtgatcaggctatgtatggaatacagtgttattttctttgaaattgtttaagtgttgtaaatatttatgtaaactgcattagaaattagctgtgtgaaataccagtgtggtttgtgtttgagttttattgagaattttaaattataacttaaaatattttataatttttaaagtatatatttatttaagcttatgtcagacctatttgacataacactataaaggttgacaataaatgtgcttatgttta

SEQ ID NO: 164 - DNA, 3249 bp, Homo sapiens
caagcttagcctggccgggaaacgggaggcgtggaggccgggagcagcccccggggtcatcgccctgccaccgccgcccgattgctttagcttggaaattccggagctgaagcggccagcgagggaggatgaccctctcggcccgggcaccctgtcagtccggaaataactgcagcatttgttccggaggggaaggcgcgaggtttccgggaaagcagcaccgccccttggcccccaggtggctagcgctataaaggatcacgcgccccagtcgacgctgagctcctctgctactcagagttgcaacctcagcctcgctatggctcccagcagcccccggcccgcgctgcccgcactcctggtcctgctcggggctctgttcccaggacctggcaatgcccagacatctgtgtccccctcaaaagtcatcctgccccggggaggctccgtgctggtgacatgcagcacctcctgtgaccagcccaagttgttgggcatagagaccccgttgcctaaaaaggagttgctcctgcctgggaacaaccggaaggtgtatgaactgagcaatgtgcaagaagatagccaaccaatgtgctattcaaactgccctgatgggcagtcaacagctaaaaccttcctcaccgtgtactggactccagaacgggtggaactggcacccctcccctcttggcagccagtgggcaagaaccttaccctacgctgccaggtggagggtggggcaccccgggccaacctcaccgtggtgctgctccgtggggagaaggagctgaaacgggagccagctgtgggggagcccgctgaggtcacgaccacggtgctggtgaggagagatcaccatggagccaatttctcgtgccgcactgaactggacctgcggccccaagggctggagctgtttgagaacacctcggccccctaccagctccagacctttgtcctgccagcgactcccccacaacttgtcagcccccgggtcctagaggtggacacgcaggggaccgtggtctgttccctggacgggctgttcccagtctcggaggcccaggtccacctggcactgggggaccagaggttgaaccccacagtcacctatggcaacgactccttctcggccaaggcctcagtcagtgtgaccgcagaggacgagggcacccagcggctgacgtgtgcagtaatactggggaaccagagccaggagacactgcagacagtgaccatctacagctttccggcgcccaacgtgattctgacgaagccagaggtctcagaagggaccgaggtgacagtgaagtgtgaggcccaccctagagccaaggtgacgctgaatggggttccagcccagccactgggcccgagggcccagctcctgctgaaggccaccccagaggacaacgggcgcagcttctcctgctctgcaaccctggaggtggccggccagcttatacacaagaaccagacccgggagcttcgtgtcctgtatggcccccgactggacgagagggattgtccgggaaactggacgtggccagaaaattcccagcagactccaatgtgccaggcttgggggaacccattgcccgagctcaagtgtctaaaggatggcactttcccactgcccatcggggaatcagtgactgtcactcgagatcttgagggcacctacctctgtcgggccaggagcactcaaggggaggtcacccgcaaggtgaccgtgaatgtgctctccccccggtatgagattgtcatcatcactgtggtagcagccgcagtcataatgggcactgcaggcctcagcacgtacctctataaccgccagcggaagatcaagaaatacagactacaacaggcccaaaaagggacccccatgaaaccgaacacacaagccacgcctccctgaacctatcccgggacagggcctcttcctcggccttcccatattggtggcagtggtgccacactgaacagagtggaagacatatgccatgcagctacacctaccggccctgggacgccggaggacagggcattgtcctcagtcagatacaacagcatttggggccatggtacctgcacacctaaaacactaggccacgcatctgatctgtagtcacatgactaagccaagaggaaggagcaagactcaagacatgattgatggatgttaaagtctagcctgatgagaggggaagtggtgggggagacatagccccaccatgaggacatacaactgggaaatactgaaacttgctgcctattgggtatgctgaggccccacagacttacagaagaagtggccctccatagacatgtgtagcatcaaaacacaaaggcccacacttcctgacggatgccagcttgggcactgctgtctactgaccccaacccttgatgatatgtatttattcatttgttattttaccagctatttattgagtgtcttttatgtaggctaaatgaacataggtctctggcctcacggagctcccagtcctaatcacattcaaggtcaccaggtacagttgtacaggttgtacactgcaggagagtgcctggcaaaaagatcaaatggggctgggacttctcattggccaacctgcctttccccagaaggagtgatttttctatcggcacaaaagcactatatggactggtaatggttacaggttcagagattacccagtgaggccttattcctcccttccccccaaaactgacacctttgttagccacctccccacccacatacatttctgccagtgttcacaatgacactcagcggtcatgtctggacatgagtgcccagggaatatgcccaagctatgccttgtcctcttgtcctgtttgcatttcactgggagcttgcactatgcagctccagtttcctgcagtgatcagggtcctgcaagcagtggggaagggggccaaggtattggaggactccctcccagctttggaagcctcatccgcgtgtgtgtgtgtgtgtatgtgtagacaagctctcgctctgtcacccaggctggagtgcagtggtgcaatcatggttcactgcagtcttgaccttttgggctcaagtgatcctcccacctcagcctcctgagtagctgggaccataggctcacaacaccacacctggcaaatttgattttttttttttttccagagacggggtctcgcaacattgcccagacttcctttgtgttagttaataaagctttctcaactgccaaa

SEQ ID NO: 165 - DNA, 2741 bp, Homo sapiens
acctccctccgcggagcagccagacagcgagggccccggccgggggcaggggggacgccccgtccggggcacccccccggctctgagccgcccgcggggccggcctcggcccggagcggaggaaggagtcgccgaggagcagcctgaggccccagagtctgagacgagccgccgccgcccccgccactgcggggaggagggggaggaggagcgggaggagggacgagctggtcgggagaagaggaaaaaaacttttgagacttttccgttgccgctgggagccggaggcgcggggacctcttggcgcgacgctgccccgcgaggaggcaggacttggggaccccagaccgcctccctttgccgccggggacgcttgctccctccctgccccctacacggcgtccctcaggcgcccccattccggaccagccctcgggagtcgccgacccggcctcccgcaaagacttttccccagacctcgggcgcaccccctgcacgccgccttcatccccggcctgtctcctgagcccccgcgcatcctagaccctttctcctccaggagacggatctctctccgacctgccacagatcccctattcaagaccacccaccttctggtaccagatcgcgcccatctaggttatttccgtgggatactgagacacccccggtccaagcctcccctccaccactgcgcccttctccctgaggacctcagctttccctcgaggccctcctaccttttgccgggagacccccagcccctgcaggggcggggcctccccaccacaccagccctgttcgcgctctcggcagtgccggggggcgccgcctcccccatgccgccctccgggctgcggctgctgccgctgctgctaccgctgctgtggctactggtgctgacgcctggccggccggccgcgggactatccacctgcaagactatcgacatggagctggtgaagcggaagcgcatcgaggccatccgcggccagatcctgtccaagctgcggctcgccagccccccgagccagggggaggtgccgcccggcccgctgcccgaggccgtgctcgccctgtacaacagcacccgcgaccgggtggccggggagagtgcagaaccggagcccgagcctgaggccgactactacgccaaggaggtcacccgcgtgctaatggtggaaacccacaacgaaatctatgacaagttcaagcagagtacacacagcatatatatgttcttcaacacatcagagctccgagaagcggtacctgaacccgtgttgctctcccgggcagagctgcgtctgctgaggctcaagttaaaagtggagcagcacgtggagctgtaccagaaatacagcaacaattcctggcgatacctcagcaaccggctgctggcacccagcgactcgccagagtggttatcttttgatgtcaccggagttgtgcggcagtggttgagccgtggaggggaaattgagggctttcgccttagcgcccactgctcctgtgacagcagggataacacactgcaagtggacatcaacgggttcactaccggccgccgaggtgacctggccaccattcatggcatgaaccggcctttcctgcttctcatggccaccccgctggagagggcccagcatctgcaaagctcccggcaccgccgagccctggacaccaactattgcttcagctccacggagaagaactgctgcgtgcggcagctgtacattgacttccgcaaggacctcggctggaagtggatccacgagcccaagggctaccatgccaacttctgcctcgggccctgcccctacatttggagcctggacacgcagtacagcaaggtcctggccctgtacaaccagcataacccgggcgcctcggcggcgccgtgctgcgtgccgcaggcgctggagccgctgcccatcgtgtactacgtgggccgcaagcccaaggtggagcagctgtccaacatgatcgtgcgctcctgcaagtgcagctgaggtcccgccccgccccgccccgccccggcaggcccggccccaccccgccccgcccccgctgccttgcccatgggggctgtatttaaggacacccgtgccccaagcccacctggggccccattaaagatggagagaggactgcggatctctgtgtcattgggcgcctgcctggggtctccatccctgacgttcccccactcccactccctctctctccctctctgcctcctcctgcctgtctgcactattcctttgcccggcatcaaggcacaggggaccagtggggaacactactgtagttagatctatttattgagcaccttgggcactgttgaagtgccttacattaatgaactcattcagtcaccatagcaacactctgagatgcagggactctgataacacccattttaaaggtgaggaaacaagcccagagaggttaagggaggagttcctgcccaccaggaacctgctttagtgggggatagtgaagaagacaataaaagatagtagttcaggccaggcggggtggctcacgcctgtaatcctagcacttttgggaggcagagatgggaggattacttgaatccaggcatttgagaccagcctgggtaacatagtgagaccctatctctacaaaacacttttaaaaaatgtacacctgtggtcccagctactctggaggctaaggtgggaggatcacttgatcctgggaggtcaaggctgcag

SEQ ID NO: 166 - DNA, 1546 bp, Homo sapiens
gggactgagcatggatttcggactggccctcctgctggcggggcttctggggctcctcctcggccagtccctccaggtgaagcccctgcaggtggagcccccggagccggtggtggccgtggccttgggcgcctcgcgccagctcacctgccgcctggcctgcgcggaccgcggggcctcggtgcagtggcggggcctggacaccagcctgggcgcggtgcagtcggacacgggccgcagcgtcctcaccgtgcgcaacgcctcgctgtcggcggccgggacccgcgtgtgcgtgggctcctgcgggggccgcaccttccagcacaccgtgcagctccttgtgtacgccttcccggaccagctgaccgtctccccagcagccctggtgcctggtgacccggaggtggcctgtacggcccacaaagtcacgcccgtggaccccaacgcgctctccttctccctgctcgtcgggggccaggaactggagggggcgcaagccctgggcccggaggtgcaggaggaggaggaggagccccagggggacgaggacgtgctgttcagggtgacagagcgctggcggctgccgcccctggggacccctgtcccgcccgccctctactgccaggccacgatgaggctgcctggcttggagctcagccaccgccaggccatccccgtcctgcacagcccgacctccccggagcctcccgacaccacctccccggagtctcccgacaccacctccccggagtctcccgacaccacctcccaggagcctcccgacaccacctccccggagcctcccgacaagacctccccggagcccgccccccagcagggctccacacacacccccaggagcccaggctccaccaggactcgccgccctgagatctcccaggctgggcccacgcagggagaagtgatcccaacaggctcgtccaaacctgcgggtgaccagctgcccgcggctctgtggaccagcagtgcggtgctgggactgctgctcctggccttgcccacctatcacctctggaaacgctgccggcacctggctgaggacgacacccacccaccagcttctctgaggcttctgccccaggtgtcggcctgggctgggttaagggggaccggccaggtcgggatcagcccctcctgagtggccagcctttccccctgtgaaagcaaaatagcttggaccccttcaagttgagaactggtcagggcaaacctgcctcccattctactcaaagtcatccctctgttcacagagatggatgcatgttctgattgcctctttggagaagctcatcagaaactcaaaagaaggccactgtttgtctcacctacccatgacctgaagcccctccctgagtggtccccacctttctggacggaaccacgtactttttacatacattgattcatgtctcacgtctccctaaaaatgcgtaagaccaagctgtgccctgaccaccctgggcccctgtcgtcaggacctcctgaggctttggcaaataaacctcctaaaatgataaaaaaaaaa

SEQ ID NO: 167 - DNA, 3220 bp, Homo sapiens
aaacttttttccctggctctgccctgggtttccccttgaagggatttccctccgcctctgcaacaagaccctttataaagcacagactttctatttcactccgcggtatctgcatcgggcctcactggcttcaggagctgaataccctcccaggcacacacaggtgggacacaaataagggttttggaaccactattttctcatcacgacagcaacttaaaatgcctgggaagatggtcgtgatccttggagcctcaaatatactttggataatgtttgcagcttctcaagcttttaaaatcgagaccaccccagaatctagatatcttgctcagattggtgactccgtctcattgacttgcagcaccacaggctgtgagtccccatttttctcttggagaacccagatagatagtccactgaatgggaaggtgacgaatgaggggaccacatctacgctgacaatgaatcctgttagttttgggaacgaacactcttacctgtgcacagcaacttgtgaatctaggaaattggaaaaaggaatccaggtggagatctactcttttcctaaggatccagagattcatttgagtggccctctggaggctgggaagccgatcacagtcaagtgttcagttgctgatgtatacccatttgacaggctggagatagacttactgaaaggagatcatctcatgaagagtcaggaatttctggaggatgcagacaggaagtccctggaaaccaagagtttggaagtaacctttactcctgtcattgaggatattggaaaagttcttgtttgccgagctaaattacacattgatgaaatggattctgtgcccacagtaaggcaggctgtaaaagaattgcaagtctacatatcacccaagaatacagttatttctgtgaatccatccacaaagctgcaagaaggtggctctgtgaccatgacctgttccagcgagggtctaccagctccagagattttctggagtaagaaattagataatgggaatctacagcacctttctggaaatgcaactctcaccttaattgctatgaggatggaagattctggaatttatgtgtgtgaaggagttaatttgattgggaaaaacagaaaagaggtggaattaattgttcaagagaaaccatttactgttgagatctcccctggaccccggattgctgctcagattggagactcagtcatgttgacatgtagtgtcatgggctgtgaatccccatctttctcctggagaacccagatagacagccctctgagcgggaaggtgaggagtgaggggaccaattccacgctgaccctgagccctgtgagttttgagaacgaacactcttatctgtgcacagtgacttgtggacataagaaactggaaaagggaatccaggtggagctctactcattccctagagatccagaaatcgagatgagtggtggcctcgtgaatgggagctctgtcactgtaagctgcaaggttcctagcgtgtacccccttgaccggctggagattgaattacttaagggggagactattctggagaatatagagtttttggaggatacggatatgaaatctctagagaacaaaagtttggaaatgaccttcatccctaccattgaagatactggaaaagctcttgtttgtcaggctaagttacatattgatgacatggaattcgaacccaaacaaaggcagagtacgcaaacactttatgtcaatgttgcccccagagatacaaccgtcttggtcagcccttcctccatcctggaggaaggcagttctgtgaatatgacatgcttgagccagggctttcctgctccgaaaatcctgtggagcaggcagctccctaacggggagctacagcctctttctgagaatgcaactctcaccttaatttctacaaaaatggaagattctggggtttatttatgtgaaggaattaaccaggctggaagaagcagaaaggaagtggaattaattatccaagttactccaaaagacataaaacttacagcttttccttctgagagtgtcaaagaaggagacactgtcatcatctcttgtacatgtggaaatgttccagaaacatggataatcctgaagaaaaaagcggagacaggagacacagtactaaaatctatagatggcgcctataccatccgaaaggcccagttgaaggatgcgggagtatatgaatgtgaatctaaaaacaaagttggctcacaattaagaagtttaacacttgatgttcaaggaagagaaaacaacaaagactatttttctcctgagcttctcgtgctctattttgcatcctccttaataatacctgccattggaatgataatttactttgcaagaaaagccaacatgaaggggtcatatagtcttgtagaagcacagaagtcaaaagtgtagctaatgcttgatatgttcaactggagacactatttatctgtgcaaatccttgatactgctcatcattccttgagaaaaacaatgagctgagaggcagacttccctgaatgtattgaacttggaaagaaatgcccatctatgtcccttgctgtgagcaagaagtcaaagtaaaacttgctgcctgaagaacagtaactgccatcaagatgagagaactggaggagttccttgatctgtatatacaataacataatttgtacatatgtaaaataaaattatgccatagcaagattgcttaaaatagcaacactctatatttagattgttaaaataactagtgttgcttggactattataatttaatgcatgttaggaaaatttcacattaatatttgctgacagctgacctttgtcatctttcttctattttattccctttcacaaaattttattcctatatagtttattgacaataatttcaggttttgtaaagatgccgggttttatatttttatagacaaataataagcaaagggagcactgggttgactttcaggtactaaatacctcaacctatggtataatggttgactgggtttctctgtatagtactggcatggtacggagatgtttcacgaagtttgttcatcagactcctgtgcaactttcccaatgtggcctaaaaatgcaacttctttttattttcttttgtaaatgtttaggtttttttgtatagtaaagtgataatttctggaattagaaaaaaaaaaaaaaaaaaa

SEQ ID NO: 168 - DNA, 8742 bp, Homo sapiens
acgcccgcgccggctgtgctgcacagggggaggagagggaaccccaggcgcgagcgggaagaggggacctgcagccacaacttctctggtcctctgcatcccttctgtccctccacccgtccccttccccaccctctggcccccaccttcttggaggcgacaacccccgggaggcattagaagggatttttcccgcaggttgcgaagggaagcaaacttggtggcaacttgcctcccggtgcgggcgtctctcccccaccgtctcaacatgcttaggggtccggggcccgggctgctgctgctggccgtccagtgcctggggacagcggtgccctccacgggagcctcgaagagcaagaggcaggctcagcaaatggttcagccccagtccccggtggctgtcagtcaaagcaagcccggttgttatgacaatggaaaacactatcagataaatcaacagtgggagcggacctacctaggcaatgcgttggtttgtacttgttatggaggaagccgaggttttaactgcgagagtaaacctgaagctgaagagacttgctttgacaagtacactgggaacacttaccgagtgggtgacacttatgagcgtcctaaagactccatgatctgggactgtacctgcatcggggctgggcgagggagaataagctgtaccatcgcaaaccgctgccatgaagggggtcagtcctacaagattggtgacacctggaggagaccacatgagactggtggttacatgttagagtgtgtgtgtcttggtaatggaaaaggagaatggacctgcaagcccatagctgagaagtgttttgatcatgctgctgggacttcctatgtggtcggagaaacgtgggagaagccctaccaaggctggatgatggtagattgtacttgcctgggagaaggcagcggacgcatcacttgcacttctagaaatagatgcaacgatcaggacacaaggacatcctatagaattggagacacctggagcaagaaggataatcgaggaaacctgctccagtgcatctgcacaggcaacggccgaggagagtggaagtgtgagaggcacacctctgtgcagaccacatcgagcggatctggccccttcaccgatgttcgtgcagctgtttaccaaccgcagcctcacccccagcctcctccctatggccactgtgtcacagacagtggtgtggtctactctgtggggatgcagtggctgaagacacaaggaaataagcaaatgctttgcacgtgcctgggcaacggagtcagctgccaagagacagctgtaacccagacttacggtggcaactcaaatggagagccatgtgtcttaccattcacctacaatggcaggacgttctactcctgcaccacagaagggcgacaggacggacatctttggtgcagcacaacttcgaattatgagcaggaccagaaatactctttctgcacagaccacactgttttggttcagactcgaggaggaaattccaatggtgccttgtgccacttccccttcctatacaacaaccacaattacactgattgcacttctgagggcagaagagacaacatgaagtggtgtgggaccacacagaactatgatgccgaccagaagtttgggttctgccccatggctgcccacgaggaaatctgcacaaccaatgaaggggtcatgtaccgcattggagatcagtgggataagcagcatgacatgggtcacatgatgaggtgcacgtgtgttgggaatggtcgtggggaatggacatgcattgcctactcgcagcttcgagatcagtgcattgttgatgacatcacttacaatgtgaacgacacattccacaagcgtcatgaagaggggcacatgctgaactgtacatgcttcggtcagggtcggggcaggtggaagtgtgatcccgtcgaccaatgccaggattcagagactgggacgttttatcaaattggagattcatgggagaagtatgtgcatggtgtcagataccagtgctactgctatggccgtggcattggggagtggcattgccaacctttacagacctatccaagctcaagtggtcctgtcgaagtatttatcactgagactccgagtcagcccaactcccaccccatccagtggaatgcaccacagccatctcacatttccaagtacattctcaggtggagacctaaaaattctgtaggccgttggaaggaagctaccataccaggccacttaaactcctacaccatcaaaggcctgaagcctggtgtggtatacgagggccagctcatcagcatccagcagtacggccaccaagaagtgactcgctttgacttcaccaccaccagcaccagcacacctgtgaccagcaacaccgtgacaggagagacgactcccttttctcctcttgtggccacttctgaatctgtgaccgaaatcacagccagtagctttgtggtctcctgggtctcagcttccgacaccgtgtcgggattccgggtggaatatgagctgagtgaggagggagatgagccacagtacctggatcttccaagcacagccacttctgtgaacatccctgacctgcttcctggccgaaaatacattgtaaatgtctatcagatatctgaggatggggagcagagtttgatcctgtctacttcacaaacaacagcgcctgatgcccctcctgacccgactgtggaccaagttgatgacacctcaattgttgttcgctggagcagaccccaggctcccatcacagggtacagaatagtctattcgccatcagtagaaggtagcagcacagaactcaaccttcctgaaactgcaaactccgtcaccctcagtgacttgcaacctggtgttcagtataacatcactatctatgctgtggaagaaaatcaagaaagtacacctgttgtcattcaacaagaaaccactggcaccccacgctcagatacagtgccctctcccagggacctgcagtttgtggaagtgacagacgtgaaggtcaccatcatgtggacaccgcctgagagtgcagtgaccggctaccgtgtggatgtgatccccgtcaacctgcctggcgagcacgggcagaggctgcccatcagcaggaacacctttgcagaagtcaccgggctgtcccctggggtcacctattacttcaaagtctttgcagtgagccatgggagggagagcaagcctctgactgctcaacagacaaccaaactggatgctcccactaacctccagtttgtcaatgaaactgattctactgtcctggtgagatggactccacctcgggcccagataacaggataccgactgaccgtgggccttacccgaagaggacagcccaggcagtacaatgtgggtccctctgtctccaagtacccactgaggaatctgcagcctgcatctgagtacaccgtatccctcgtggccataaagggcaaccaagagagccccaaagccactggagtctttaccacactgcagcctgggagctctattccaccttacaacaccgaggtgactgagaccaccattgtgatcacatggacgcctgctccaagaattggttttaagctgggtgtacgaccaagccagggaggagaggcaccacgagaagtgacttcagactcaggaagcatcgttgtgtccggcttgactccaggagtagaatacgtctacaccatccaagtcctgagagatggacaggaaagagatgcgccaattgtaaacaaagtggtgacaccattgtctccaccaacaaacttgcatctggaggcaaaccctgacactggagtgctcacagtctcctgggagaggagcaccaccccagacattactggttatagaattaccacaacccctacaaacggccagcagggaaattctttggaagaagtggtccatgctgatcagagctcctgcacttttgataacctgagtcccggcctggagtacaatgtcagtgtttacactgtcaaggatgacaaggaaagtgtccctatctctgataccatcatcccagaggtgccccaactcactgacctaagctttgttgatataaccgattcaagcatcggcctgaggtggaccccgctaaactcttccaccattattgggtaccgcatcacagtagttgcggcaggagaaggtatccctatttttgaagattttgtggactcctcagtaggatactacacagtcacagggctggagccgggcattgactatgatatcagcgttatcactctcattaatggcggcgagagtgcccctactacactgacacaacaaacggctgttcctcctcccactgacctgcgattcaccaacattggtccagacaccatgcgtgtcacctgggctccacccccatccattgatttaaccaacttcctggtgcgttactcacctgtgaaaaatgaggaagatgttgcagagttgtcaatttctccttcagacaatgcagtggtcttaacaaatctcctgcctggtacagaatatgtagtgagtgtctccagtgtctacgaacaacatgagagcacacctcttagaggaagacagaaaacaggtcttgattccccaactggcattgacttttctgatattactgccaactcttttactgtgcactggattgctcctcgagccaccatcactggctacaggatccgccatcatcccgagcacttcagtgggagacctcgagaagatcgggtgccccactctcggaattccatcaccctcaccaacctcactccaggcacagagtatgtggtcagcatcgttgctcttaatggcagagaggaaagtcccttattgattggccaacaatcaacagtttctgatgttccgagggacctggaagttgttgctgcgacccccaccagcctactgatcagctgggatgctcctgctgtcacagtgagatattacaggatcacttacggagagacaggaggaaatagccctgtccaggagttcactgtgcctgggagcaagtctacagctaccatcagcggccttaaacctggagttgattataccatcactgtgtatgctgtcactggccgtggagacagccccgcaagcagcaagccaatttccattaattaccgaacagaaattgacaaaccatcccagatgcaagtgaccgatgttcaggacaacagcattagtgtcaagtggctgccttcaagttcccctgttactggttacagagtaaccaccactcccaaaaatggaccaggaccaacaaaaactaaaactgcaggtccagatcaaacagaaatgactattgaaggcttgcagcccacagtggagtatgtggttagtgtctatgctcagaatccaagcggagagagtcagcctctggttcagactgcagtaaccaacattgatcgccctaaaggactggcattcactgatgtggatgtcgattccatcaaaattgcttgggaaagcccacaggggcaagtttccaggtacagggtgacctactcgagccctgaggatggaatccatgagctattccctgcacctgatggtgaagaagacactgcagagctgcaaggcctcagaccgggttctgagtacacagtcagtgtggttgccttgcacgatgatatggagagccagcccctgattggaacccagtccacagctattcctgcaccaactgacctgaagttcactcaggtcacacccacaagcctgagcgcccagtggacaccacccaatgttcagctcactggatatcgagtgcgggtgacccccaaggagaagaccggaccaatgaaagaaatcaaccttgctcctgacagctcatccgtggttgtatcaggacttatggtggccaccaaatatgaagtgagtgtctatgctcttaaggacactttgacaagcagaccagctcagggagttgtcaccactctggagaatgtcagcccaccaagaagggctcgtgtgacagatgctactgagaccaccatcaccattagctggagaaccaagactgagacgatcactggcttccaagttgatgccgttccagccaatggccagactccaatccagagaaccatcaagccagatgtcagaagctacaccatcacaggtttacaaccaggcactgactacaagatctacctgtacaccttgaatgacaatgctcggagctcccctgtggtcatcgacgcctccactgccattgatgcaccatccaacctgcgtttcctggccaccacacccaattccttgctggtatcatggcagccgccacgtgccaggattaccggctacatcatcaagtatgagaagcctgggtctcctcccagagaagtggtccctcggccccgccctggtgtcacagaggctactattactggcctggaaccgggaaccgaatatacaatttatgtcattgccctgaagaataatcagaagagcgagcccctgattggaaggaaaaagacagacgagcttccccaactggtaacccttccacaccccaatcttcatggaccagagatcttggatgttccttccacagttcaaaagacccctttcgtcacccaccctgggtatgacactggaaatggtattcagcttcctggcacttctggtcagcaacccagtgttgggcaacaaatgatctttgaggaacatggttttaggcggaccacaccgcccacaacggccacccccataaggcataggccaagaccatacccgccgaatgtaggacaagaagctctctctcagacaaccatctcatgggccccattccaggacacttctgagtacatcatttcatgtcatcctgttggcactgatgaagaacccttacagttcagggttcctggaacttctaccagtgccactctgacaggcctcaccagaggtgccacctacaacatcatagtggaggcactgaaagaccagcagaggcataaggttcgggaagaggttgttaccgtgggcaactctgtcaacgaaggcttgaaccaacctacggatgactcgtgctttgacccctacacagtttcccattatgccgttggagatgagtgggaacgaatgtctgaatcaggctttaaactgttgtgccagtgcttaggctttggaagtggtcatttcagatgtgattcatctagatggtgccatgacaatggtgtgaactacaagattggagagaagtgggaccgtcagggagaaaatggccagatgatgagctgcacatgtcttgggaacggaaaaggagaattcaagtgtgaccctcatgaggcaacgtgttatgatgatgggaagacataccacgtaggagaacagtggcagaaggaatatctcggtgccatttgctcctgcacatgctttggaggccagcggggctggcgctgtgacaactgccgcagacctgggggtgaacccagtcccgaaggcactactggccagtcctacaaccagtattctcagagataccatcagagaacaaacactaatgttaattgcccaattgagtgcttcatgcctttagatgtacaggctgacagagaagattcccgagagtaaatcatctttccaatccagaggaacaagcatgtctctctgccaagatccatctaaactggagtgatgttagcagacccagcttagagttcttctttctttcttaagccctttgctctggaggaagttctccagcttcagctcaactcacagcttctccaagcatcaccctgggagtttcctgagggttttctcataaatgagggctgcacattgcctgttctgcttcgaagtattcaataccgctcagtattttaaatgaagtgattctaagatttggtttgggatcaataggaaagcatatgcagccaaccaagatgcaaatgttttgaaatgatatgaccaaaattttaagtaggaaagtcacccaaacacttctgctttcacttaagtgtctggcccgcaatactgtaggaacaagcatgatcttgttactgtgatattttaaatatccacagtactcactttttccaaatgatcctagtaattgcctagaaatatctttctcttacctgttatttatcaatttttcccagtatttttatacggaaaaaattgtattgaaaacacttagtatgcagttgataagaggaatttggtataattatggtgggtgattattttttatactgtatgtgccaaagctttactactgtggaaagacaactgttttaataaaagatttacattccacaacttgaagttcatctatttgatataagacaccttcgggggaaataattcctgtgaatattctttttcaattcagcaaacatttgaaaatctatgatgtgcaagtctaattgttgatttcagtacaagattttctaaatcagttgctacaaaaactgattggtttttgtcacttcatctcttcactaatggagatagctttacactttctgctttaatagatttaagtggaccccaatatttattaaaattgctagtttaccgttcagaagtataatagaaataatctttagttgctcttttctaaccattgtaattcttcccttcttccctccacctttccttcattgaataaacctctgttcaaagagattgcctgcaagggaaataaaaatgactaagatattaaaagtatttgaatagtaaaaaaaaaaaaaaaaaaa

SEQ ID NO: 169 - DNA, 1678 bp, Homo sapiens
gagcaaacagagcagcagaaaaggcagttcctcttctccagtgccctccttccctgtctctgcctctccctcccttcctcaggcatcagagcggagacttcagggagaccagagcccagcttgccaggcactgagctagaagccctgccatggcacccctgagaccccttctcatactggccctgctggcatgggttgctctggctgaccaagagtcatgcaagggccgctgcactgagggcttcaacgtggacaagaagtgccagtgtgacgagctctgctcttactaccagagctgctgcacagactatacggctgagtgcaagccccaagtgactcgcggggatgtgttcactatgccggaggatgagtacacggtctatgacgatggcgaggagaaaaacaatgccactgtccatgaacaggtggggggcccctccctgacctctgacctccaggcccagtccaaagggaatcctgagcagacacctgttctgaaacctgaggaagaggcccctgcgcctgaggtgggcgcctctaagcctgaggggatagactcaaggcctgagacccttcatccagggagacctcagcccccagcagaggaggagctgtgcagtgggaagcccttcgacgccttcaccgacctcaagaacggttccctctttgccttccgagggcagtactgctatgaactggacgaaaaggcagtgaggcctgggtaccccaagctcatccgagatgtctggggcatcgagggccccatcgatgccgccttcacccgcatcaactgtcaggggaagacctacctcttcaagggtagtcagtactggcgctttgaggatggtgtcctggaccctgattacccccgaaatatctctgacggcttcgatggcatcccggacaacgtggatgcagccttggccctccctgcccatagctacagtggccgggagcgggtctacttcttcaaggggaaacagtactgggagtaccagttccagcaccagcccagtcaggaggagtgtgaaggcagctccctgtcggctgtgtttgaacactttgccatgatgcagcgggacagctgggaggacatcttcgagcttctcttctggggcagaacctctgctggtaccagacagccccagttcattagccgggactggcacggtgtgccagggcaagtggacgcagccatggctggccgcatctacatctcaggcatggcaccccgcccctccttggccaagaaacaaaggtttaggcatcgcaaccgcaaaggctaccgttcacaacgaggccacagccgtggccgcaaccagaactcccgccggccatcccgcgccacgtggctgtccttgttctccagtgaggagagcaacttgggagccaacaactatgatgactacaggatggactggcttgtgcctgccacctgtgaacccatccagagtgtcttcttcttctctggagacaagtactaccgagtcaatcttcgcacacggcgagtggacactgtggaccctccctacccacgctccatcgctcagtactggctgggctgcccagctcctggccatctgtaggagtcagagcccacatggccgggccctctgtagctccctcctcccatctccttcccccagcccaataaaggtcccttagccccgagtttaaa

SEQ ID NO: 170 - DNA, 8605 bp, Homo sapiens
aattcgccaactgaaaaagtgggaaaggatgtctggaggcgaggcgtcccattacagaggaaggagctcgctatataagccagccaaagttggctgcaccggccacagcctgcctactgtcacccgcctctcccgcgcgcagatacacgcccccgcctccgtgggcacaaaggcagcgctgctggggaactcgggggaacgcgcacgtgggaaccgccgcagctccacactccaggtacttcttccaaggacctaggtctctcgcccatcggaaagaaaataattctttcaagaagatcagggacaactgatttgaagtctactctgtgcttctaaatccccaattctgctgaaagtgagataccctagagccctagagccccagcagcacccagccaaacccacctccaccatgggggccatgactcagctgttggcaggtgtctttcttgctttccttgccctcgctaccgaaggtggggtcctcaagaaagtcatccggcacaagcgacagagtggggtgaacgccaccctgccagaagagaaccagccagtggtgtttaaccacgtttacaacatcaagctgccagtgggatcccagtgttcggtggatctggagtcagccagtggggagaaagacctggcaccgccttcagagcccagcgaaagctttcaggagcacacagtggatggggaaaaccagattgtcttcacacatcgcatcaacatcccccgccgggcctgtggctgtgccgcagcccctgatgttaaggagctgctgagcagactggaggagctggagaacctggtgtcttccctgagggagcaatgtactgcaggagcaggctgctgtctccagcctgccacaggccgcttggacaccaggcccttctgtagcggtcggggcaacttcagcactgaaggatgtggctgtgtctgcgaacctggctggaaaggccccaactgctctgagcccgaatgtccaggcaactgtcaccttcgaggccggtgcattgatgggcagtgcatctgtgacgacggcttcacgggcgaggactgcagccagctggcttgccccagcgactgcaatgaccagggcaagtgcgtaaatggagtctgcatctgtttcgaaggctacgccggggctgactgcagccgtgaaatctgcccagtgccctgcagtgaggagcacggcacatgtgtagatggcttgtgtgtgtgccacgatggctttgcaggcgatgactgcaacaagcctctgtgtctcaacaattgctacaaccgtggacgatgcgtggagaatgagtgcgtgtgtgatgagggtttcacgggcgaagactgcagtgagctcatctgccccaatgactgcttcgaccggggccgctgcatcaatggcacctgctactgcgaagaaggcttcacaggtgaagactgcgggaaacccacctgcccacatgcctgccacacccagggccggtgtgaggaggggcagtgtgtatgtgatgagggctttgccggtgtggactgcagcgagaagaggtgtcctgctgactgtcacaatcgtggccgctgtgtagacgggcggtgtgagtgtgatgatggtttcactggagctgactgtggggagctcaagtgtcccaatggctgcagtggccatggccgctgtgtcaatgggcagtgtgtgtgtgatgagggctatactggggaggactgcagccagctacggtgccccaatgactgtcacagtcggggccgctgtgtcgagggcaaatgtgtatgtgagcaaggcttcaagggctatgactgcagtgacatgagctgccctaatgactgtcaccagcacggccgctgtgtgaatggcatgtgtgtttgtgatgacggctacacaggggaagactgccgggatcgccaatgccccagggactgcagcaacaggggcctctgtgtggacggacagtgcgtctgtgaggacggcttcaccggccctgactgtgcagaactctcctgtccaaatgactgccatggccagggtcgctgtgtgaatgggcagtgcgtgtgccatgaaggatttatgggcaaagactgcaaggagcaaagatgtcccagtgactgtcatggccagggccgctgcgtggacggccagtgcatctgccacgagggcttcacaggcctggactgtggccagcactcctgccccagtgactgcaacaacttaggacaatgcgtctcgggccgctgcatctgcaacgagggctacagcggagaagactgctcagaggtgtctcctcccaaagacctcgttgtgacagaagtgacggaagagacggtcaacctggcctgggacaatgagatgcgggtcacagagtaccttgtcgtgtacacgcccacccacgagggtggtctggaaatgcagttccgtgtgcctggggaccagacgtccaccatcatccaggagctggagcctggtgtggagtactttatccgtgtatttgccatcctggagaacaagaagagcattcctgtcagcgccagggtggccacgtacttacctgcacctgaaggcctgaaattcaagtccatcaaggagacatctgtggaagtggagtgggatcctctagacattgcttttgaaacctgggagatcatcttccggaatatgaataaagaagatgagggagagatcaccaaaagcctgaggaggccagagacctcttaccggcaaactggtctagctcctgggcaagagtatgagatatctctgcacatagtgaaaaacaatacccggggccctggcctgaagagggtgaccaccacacgcttggatgcccccagccagatcgaggtgaaagatgtcacagacaccactgccttgatcacctggttcaagcccctggctgagatcgatggcattgagctgacctacggcatcaaagacgtgccaggagaccgtaccaccatcgatctcacagaggacgagaaccagtactccatcgggaacctgaagcctgacactgagtacgaggtgtccctcatctcccgcagaggtgacatgtcaagcaacccagccaaagagaccttcacaacaggcctcgatgctcccaggaatcttcgacgtgtttcccagacagataacagcatcaccctggaatggaggaatggcaaggcagctattgacagttacagaattaagtatgcccccatctctggaggggaccacgctgaggttgatgttccaaagagccaacaagccacaaccaaaaccacactcacaggtctgaggccgggaactgaatatgggattggagtttctgctgtgaaggaagacaaggagagcaatccagcgaccatcaacgcagccacagagttggacacgcccaaggaccttcaggtttctgaaactgcagagaccagcctgaccctgctctggaagacaccgttggccaaatttgaccgctaccgcctcaattacagtctccccacaggccagtgggtgggagtgcagcttccaagaaacaccacttcctatgtcctgagaggcctggaaccaggacaggagtacaatgtcctcctgacagccgagaaaggcagacacaagagcaagcccgcacgtgtgaaggcatccactgaacaagcccctgagctggaaaacctcaccgtgactgaggttggctgggatggcctcagactcaactggaccgcagctgaccaggcctatgagcactttatcattcaggtgcaggaggccaacaaggtggaggcagctcggaacctcaccgtgcctggcagccttcgggctgtggacataccgggcctcaaggctgctacgccttatacagtctccatctatggggtgatccagggctatagaacaccagtgctctctgctgaggcctccacaggggaaactcccaatttgggagaggtcgtggtggccgaggtgggctgggatgccctcaaactcaactggactgctccagaaggggcctatgagtactttttcattcaggtgcaggaggctgacacagtagaggcagcccagaacctcaccgtcccaggaggactgaggtccacagacctgcctgggctcaaagcagccactcattataccatcaccatccgcggggtcactcaggacttcagcacaacccctctctctgttgaagtcttgacagaggaggttccagatatgggaaacctcacagtgaccgaggttagctgggatgctctcagactgaactggaccacgccagatggaacctatgaccagtttactattcaggtccaggaggctgaccaggtggaagaggctcacaatctcacggttcctggcagcctgcgttccatggaaatcccaggcctcagggctggcactccttacacagtcaccctgcacggcgaggtcaggggccacagcactcgaccccttgctgtagaggtcgtcacagaggatctcccacagctgggagatttagccgtgtctgaggttggctgggatggcctcagactcaactggaccgcagctgacaatgcctatgagcactttgtcattcaggtgcaggaggtcaacaaagtggaggcagcccagaacctcacgttgcctggcagcctcagggctgtggacatcccgggcctcgaggctgccacgccttatagagtctccatctatggggtgatccggggctatagaacaccagtactctctgctgaggcctccacagccaaagaacctgaaattggaaacttaaatgtttctgacataactcccgagagcttcaatctctcctggatggctaccgatgggatcttcgagacctttaccattgaaattattgattccaataggttgctggagactgtggaatataatatctctggtgctgaacgaactgcccatatctcagggctaccccctagtactgattttattgtctacctctctggacttgctcccagcatccggaccaaaaccatcagtgccacagccacgacagaggccctgccccttctggaaaacctaaccatttccgacattaatccctacgggttcacagtttcctggatggcatcggagaatgcctttgacagctttctagtaacggtggtggattctgggaagctgctggacccccaggaattcacactttcaggaacccagaggaagctggagcttagaggcctcataactggcattggctatgaggttatggtctctggcttcacccaagggcatcaaaccaagcccttgagggctgagattgttacagaagccgaaccggaagttgacaaccttctggtttcagatgccaccccagacggtttccgtctgtcctggacagctgatgaaggggtcttcgacaattttgttctcaaaatcagagataccaaaaagcagtctgagccactggaaataaccctacttgcccccgaacgtaccagggacataacaggtctcagagaggctactgaatacgaaattgaactctatggaataagcaaaggaaggcgatcccagacagtcagtgctatagcaacaacagccatgggctccccaaaggaagtcattttctcagacatcactgaaaattcggctactgtcagctggagggcacccacagcccaagtggagagcttccggattacctatgtgcccattacaggaggtacaccctccatggtaactgtggacggaaccaagactcagaccaggctggtgaaactcatacctggcgtggagtaccttgtcagcatcatcgccatgaagggctttgaggaaagtgaacctgtctcagggtcattcaccacagctctggatggcccatctggcctggtgacagccaacatcactgactcagaagccttggccaggtggcagccagccattgccactgtggacagttatgtcatctcctacacaggcgagaaagtgccagaaattacacgcacggtgtccgggaacacagtggagtatgctctgaccgacctcgagcctgccacggaatacacactgagaatctttgcagagaaagggccccagaagagctcaaccatcactgccaagttcacaacagacctcgattctccaagagacttgactgctactgaggttcagtcggaaactgccctccttacctggcgacccccccgggcatcagtcaccggttacctgctggtctatgaatcagtggatggcacagtcaaggaagtcattgtgggtccagataccacctcctacagcctggcagacctgagcccatccacccactacacagccaagatccaggcactcaatgggcccctgaggagcaatatgatccagaccatcttcaccacaattggactcctgtaccccttccccaaggactgctcccaagcaatgctgaatggagacacgacctctggcctctacaccatttatctgaatggtgataaggctgaggcgctggaagtcttctgtgacatgacctctgatgggggtggatggattgtgttcctgagacgcaaaaacggacgcgagaacttctaccaaaactggaaggcatatgctgctggatttggggaccgcagagaagaattctggcttgggctggacaacctgaacaaaatcacagcccaggggcagtacgagctccgggtggacctgcgggaccatggggagacagcctttgctgtctatgacaagttcagcgtgggagatgccaagactcgctacaagctgaaggtggaggggtacagtgggacagcaggtgactccatggcctaccacaatggcagatccttctccacctttgacaaggacacagattcagccatcaccaactgtgctctgtcctacaaaggggctttctggtacaggaactgtcaccgtgtcaacctgatggggagatatggggacaataaccacagtcagggcgttaactggttccactggaagggccacgaacactcaatccagtttgctgagatgaagctgagaccaagcaacttcagaaatcttgaaggcaggcgcaaacgggcataaattccagggaccactgggtgagagaggaataaggcccagagcgaggaaaggattttaccaaagcatcaatacaaccagcccaaccatcggtccacacctgggcatttggtgagagtcaaagctgaccatggatccctggggccaacggcaacagcatgggcctcacctcctctgtgatttctttctttgcaccaaagacatcagtctccaacatgtttctgttttgttgtttgattcagcaaaaatctcccagtgacaacatcgcaatagttttttacttctcttaggtggctctgggaatgggagaggggtaggatgtacaggggtagtttgttttagaaccagccgtattttacatgaagctgtataattaattgtcattatttttgttagcaaagattaaatgtgtcattggaagccatccctttttttacatttcatacaacagaaaccagaaaagcaatactgtttccattttaaggatatgattaatattattaatataataatgatgatgatgatgatgaaaactaaggatttttcaagagatctttctttccaaaacatttctggacagtacctgattgtattttttttttaaataaaagcacaagtacttttgagtttgttattttgctttgaattgttgagtctgaatttcaccaaagccaatcatttgaacaaagcggggaatgttgggataggaaaggtaagtagggatagtggtcaagtgggaggggtggaaaggagactaaagactgggagagagggaagcactttttttaaataaagttgaacacacttgggaaaagcttacaggccaggcctgtaatcccaacactttgggaggccaaggtgggaggatagcttaaccccaggagtttgagaccagcctgagcaacatagtgagaacttgtctctacagaaaaaaaaaaaaaaaaaaatttaattaggcaagcgtggtagtgcgcacctgtcgtcccagctactcaggaggctgaggtaggaaaatcactggagcccaggagttagaggttacagtgagctatgatcacactactgcactccagcctgggcaacagagggagaccctgtctctaaataaaaaaagaaaagaaaaaaaaagcttacaacttgagattcagcatcttgctcagtatttccaagactaatagattatggtttaaaagatgcttttatactcattttctaatgcaactcctagaaactctatgatatagttgaggtaagtattgttaccacacatgggctaagatccccagaggcagactgcctgagttcaattcttggctccaccattcccaagttccctaacctctctatgcctcagtttcctcttctgtaaagtagggacactcatacttctcatttcagaacatttttgtgaagaataaattatgttatccatttgaggcccttagaatggtacccggtgtatattaagtgctagtacatgttagctatcatcattatcactttatatgagatggactggggttcatagaaacccaatgacttgattgtggctactactcaataaataatagaatttggatttaaaaaaaa

SEQ ID NO: 171 - DNA, 1616 bp, Homo sapiens
ctccctgtgttggtggaggatgtctgcagcagcatttaaattctgggagggcttggttgtcagcagcagcaggaggaggcagagcacagcatcgtcgggaccagactcgtctcaggccagttgcagccttctcagccaaacgccgaccaaggaaaactcactaccatgagaattgcagtgatttgcttttgcctcctaggcatcacctgtgccataccagttaaacaggctgattctggaagttctgaggaaaagcagctttacaacaaatacccagatgctgtggccacatggctaaaccctgacccatctcagaagcagaatctcctagccccacagacccttccaagtaagtccaacgaaagccatgaccacatggatgatatggatgatgaagatgatgatgaccatgtggacagccaggactccattgactcgaacgactctgatgatgtagatgacactgatgattctcaccagtctgatgagtctcaccattctgatgaatctgatgaactggtcactgattttcccacggacctgccagcaaccgaagttttcactccagttgtccccacagtagacacatatgatggccgaggtgatagtgtggtttatggactgaggtcaaaatctaagaagtttcgcagacctgacatccagtaccctgatgctacagacgaggacatcacctcacacatggaaagcgaggagttgaatggtgcatacaaggccatccccgttgcccaggacctgaacgcgccttctgattgggacagccgtgggaaggacagttatgaaacgagtcagctggatgaccagagtgctgaaacccacagccacaagcagtccagattatataagcggaaagccaatgatgagagcaatgagcattccgatgtgattgatagtcaggaactttccaaagtcagccgtgaattccacagccatgaatttcacagccatgaagatatgctggttgtagaccccaaaagtaaggaagaagataaacacctgaaatttcgtatttctcatgaattagatagtgcatcttctgaggtcaattaaaaggagaaaaaatacaatttctcactttgcatttagtcaaaagaaaaaatgctttatagcaaaatgaaagagaacatgaaatgcttctttctcagtttattggttgaatgtgtatctatttgagtctggaaataactaatgtgtttgataattagtttagtttgtggcttcatggaaactccctgtaaactaaaagcttcagggttatgtctatgttcattctatagaagaaatgcaaactatcactgtattttaatatttgttattctctcatgaatagaaatttatgtagaagcaaacaaaatacttttacccacttaaaaagagaatataacattttatgtcactataatcttttgttttttaagttagtgtatattttgttgtgattatctttttgtggtgtgaataaatcttttatcttgaatgtaataagaatttggtggtgtcaattgcttatttgttttcccacggttgtccagcaattaataaaacataaccttttttactgcctaaaaaaaaaaaaaaaaaaaaaaaaaaaaaaaaaa

SEQ ID NO: 172 - DNA, 4592 bp, Homo sapiens
tagaagggagcgggagggggctccgggcgccgcgcagcagacctgctccggccgcgcgcctcgccgctgtcctccgggagcggcagcagtagcccgggcggcgagggctgggggttcctcgagactctcagaggggcgcctcccatcggcgcccaccaccccaacctgttcctcgcgcgccactgcgctgcgccccaggacccgctgcccaacatggattttctcctggcgctggtgctggtatcctcgctctacctgcaggcggccgccgagttcgacgggaggtggcccaggcaaatagtgtcatcgattggcctatgtcgttatggtgggaggattgactgctgctggggctgggctcgccagtcttggggacagtgtcagcctgtgtgccaaccacgatgcaaacatggtgaatgtatcgggccaaacaagtgcaagtgtcatcctggttatgctggaaaaacctgtaatcaagatctaaatgagtgtggcctgaagccccggccctgtaagcacaggtgcatgaacacttacggcagctacaagtgctactgtctcaacggatatatgctcatgccggatggttcctgctcaagtgccctgacctgctccatggcaaactgtcagtatggctgtgatgttgttaaaggacaaatacggtgccagtgcccatcccctggcctgcagctggctcctgatgggaggacctgtgtagatgttgatgaatgtgctacaggaagagcctcctgccctagatttaggcaatgtgtcaacacttttgggagctacatctgcaagtgtcataaaggcttcgatctcatgtatattggaggcaaatatcaatgtcatgacatagacgaatgctcacttggtcagtatcagtgcagcagctttgctcgatgttataacatacgtgggtcctacaagtgcaaatgtaaagaaggataccagggtgatggactgacttgtgtgtatatcccaaaagttatgattgaaccttcaggtccaattcatgtaccaaagggaaatggtaccattttaaagggtgacacaggaaataataattggattcctgatgttggaagtacttggtggcctccgaagacaccatatattcctcctatcattaccaacaggcctacttctaagccaacaacaagacctacaccaaagccaacaccaattcctactccaccaccaccaccacccctgccaacagagctcagaacacctctaccacctacaaccccagaaaggccaaccaccggactgacaactatagcaccagctgccagtacacctccaggagggattacagttgacaacagggtacagacagaccctcagaaacccagaggagatgtgttcattccacggcaaccttcaaatgacttgtttgaaatatttgaaatagaaagaggagtcagtgcagacgatgaagcaaaggatgatccaggtgttctggtacacagttgtaattttgaccatggactttgtggatggatcagggagaaagacaatgacttgcactgggaaccaatcagggacccagcaggtggacaatatctgacagtgtcggcagccaaagccccagggggaaaagctgcacgcttggtgctacctctcggccgcctcatgcattcaggggacctgtgcctgtcattcaggcacaaggtgacggggctgcactctggcacactccaggtgtttgtgagaaaacacggtgcccacggagcagccctgtggggaagaaatggtggccatggctggaggcaaacacagatcaccttgcgaggggctgacatcaagagcgtcgtcttcaaaggtgaaaaaaggcgtggtcacactggggagattggattagatgatgtgagcttgaaaaaaggccactgctctgaagaacgctaacaactccagaactaacaatgaactcctatgttgctctatcctctttttccaattctcatcttctctcctcttctcccttttatcaggcctaggagaagagtgggtcagtgggtcagaaggaagtctatttggtgacccaggtttttctggcctgcttttgtgcaatcccaatgaacagtgataccctccttgaaatacaggggcatcgcagacacatcaaagccatctgtgggtgttgccttccatcctgtgtctctttcaggaaggcattcagcatgcgtgagccataccatcctccatcctgattacaaggtgctccttgtagcaaattatgagagtgagttacgggagcagtttttaaaagaaatctttgcagatggctatgatgttatgtgttcggtgttgtaccatgagtagtattgacttcccttgagatatgatgtacaatgtgcttgtgaaattgacttaccctcttcacttaagttagttctggcctgacctgaactctgacttttactgccattcactttataaaataagggtgtgtaacatatcaagatacatttatttttatctgttttttttttcctgttaaagacaattatgtagagtgggcacgtaatccctccttagtagtattgtgttttgtgtaaatgtgctattgatattaagtatttacatgttccaaatatttacagactctagttgcaaggtaaagggcagcttgtgatctcaaaaaaatacatggtgaaatgtcatccagttccatgaccttatattggcagcagtaggaaattggcagaagtgttgggttgtggtaacggagtgatgaatttttttttaatggccttgagtttgatctctgcaaaggataggaaacctttaggaagacaagaaactgcagttaatttagaactgtcactgtttcaagttacactttaaaaccacagcttttaccatcataacatggctctggtaatatgtaggaagctttataaaagttttggttgattcagaaaaaggatcctgttgcagagtgagaggaagcatagggggaaactccattggaacagattttcacacaacgttttaaattgatataagtttaggcagttgtagttcataacttatgttgctcatgttgtgctgtgtcaggatgggataggaagcaagtcccatgcttagaggcatgggatgtgttggaacgggatttacacacactggaggagcagggcaagttggaattctaagatccatgaacccccaactgtatttcctccctgcatattttaccaatatattaaaaaacaatgtaacttttaaaaggcatcattcctgaggtttgtcttaatttctgattaagtaatcagaatattttctgctatttttgccaggaatcacaaagatgattaaagggttggaaaaaaagatctatgatggaaaattaaaggaactgggattattgagcctggagaagagaagactgaggggcaaaccattgatggttttcaagtatatgaagggttggcacagagagggtggcgaccagctgttctccatatgcactaagaatagaacaagaggaaactggcttagactagagtataagggagcatttcttggcaggggccattgttagaatacttcataaaaaaagaagtgtgaaaatctcagtatctctctctctttctaaaaaattagataaaaatttgtctatttaagatggttaaagatgttcttacccaaggaaaagtaacaaattatagaatttcccaaaagatgttttgatcctactagtagtatgcagtgaaaatctttagaactaaataatttggacaaggcttaatttaggcatttccctcttgacctcctaatggagagggattgaaaggggaagagcccaccaaatgctgagctcactgaaatatctctcccttatggcaatcctagcagtattaaagaaaaaaggaaactatttattccaaatgagagtatgatggacagatattttagtatctcagtaatgtcctagtgtggcggtggttttcaatgtttcttcatgttaaaggtataagcctttcatttgttcaatggatgatgtttcagatttttttttttttaagagatccttcaaggaacacagttcagagagattttcatcgggtgcattctctctgcttcgtgtgtgacaagttatcttggctgctgagaaagagtgccctgccccacaccggcagacctttccttcacctcatcagtatgattcagtttctcttatcaattggactctcccaggttccacagaacagtaatattttttgaacaataggtacaatagaaggtcttctgtcatttaacctggtaaaggcagggctggagggggaaaataaatcattaagcctttgagtaacggcagaatatatggctgtagatccatttttaatggttcatttcctttatggtcatataactgcacagctgaagatgaaaggggaaaataaatgaaaattttacttttcgatgccaatgatacattgcactaaactgatggaagaagttatccaaagtactgtataacatcttgtttattatttaatgttttctaaaataaaaaatgttagtggttttccaaatggcctaataaaaacaattatttgtaaataaaaacactgttagtaata

SEQ ID NO: 173 - DNA, 3538 bp, Homo sapiens
gaatcattaacttaatttgactatctggtttgtggatgcgtttactctcatgtaagtcaacaacatcctgggattgggacccactttctgggcactgctggccagtcccaaaatggaacataaggaagtggttcttctacttcttttatttctgaaatcaggtcaaggagagcctctggatgactatgtgaatacccagggggcttcactgttcagtgtcactaagaagcagctgggagcaggaagtatagaagaatgtgcagcaaaatgtgaggaggacgaagaattcacctgcagggcattccaatatcacagtaaagagcaacaatgtgtgataatggctgaaaacaggaagtcctccataatcattaggatgagagatgtagttttatttgaaaagaaagtgtatctctcagagtgcaagactgggaatggaaagaactacagagggacgatgtccaaaacaaaaaatggcatcacctgtcaaaaatggagttccacttctccccacagacctagattctcacctgctacacacccctcagagggactggaggagaactactgcaggaatccagacaacgatccgcaggggccctggtgctatactactgatccagaaaagagatatgactactgcgacattcttgagtgtgaagaggaatgtatgcattgcagtggagaaaactatgacggcaaaatttccaagaccatgtctggactggaatgccaggcctgggactctcagagcccacacgctcatggatacattccttccaaatttccaaacaagaacctgaagaagaattactgtcgtaaccccgatagggagctgcggccttggtgtttcaccaccgaccccaacaagcgctgggaactttgtgacatcccccgctgcacaacacctccaccatcttctggtcccacctaccagtgtctgaagggaacaggtgaaaactatcgcgggaatgtggctgttaccgtgtccgggcacacctgtcagcactggagtgcacagacccctcacacacataacaggacaccagaaaacttcccctgcaaaaatttggatgaaaactactgccgcaatcctgacggaaaaagggccccatggtgccatacaaccaacagccaagtgcggtgggagtactgtaagataccgtcctgtgactcctccccagtatccacggaacaattggctcccacagcaccacctgagctaacccctgtggtccaggactgctaccatggtgatggacagagctaccgaggcacatcctccaccaccaccacaggaaagaagtgtcagtcttggtcatctatgacaccacaccggcaccagaagaccccagaaaactacccaaatgctggcctgacaatgaactactgcaggaatccagatgccgataaaggcccctggtgttttaccacagaccccagcgtcaggtgggagtactgcaacctgaaaaaatgctcaggaacagaagcgagtgttgtagcacctccgcctgttgtcctgcttccagatgtagagactccttccgaagaagactgtatgtttgggaatgggaaaggataccgaggcaagagggcgaccactgttactgggacgccatgccaggactgggctgcccaggagccccatagacacagcattttcactccagagacaaatccacgggcgggtctggaaaaaaattactgccgtaaccctgatggtgatgtaggtggtccctggtgctacacgacaaatccaagaaaactttacgactactgtgatgtccctcagtgtgcggccccttcatttgattgtgggaagcctcaagtggagccgaagaaatgtcctggaagggttgtaggggggtgtgtggcccacccacattcctggccctggcaagtcagtcttagaacaaggtttggaatgcacttctgtggaggcaccttgatatccccagagtgggtgttgactgctgcccactgcttggagaagtccccaaggccttcatcctacaaggtcatcctgggtgcacaccaagaagtgaatctcgaaccgcatgttcaggaaatagaagtgtctaggctgttcttggagcccacacgaaaagatattgccttgctaaagctaagcagtcctgccgtcatcactgacaaagtaatcccagcttgtctgccatccccaaattatgtggtcgctgaccggaccgaatgtttcatcactggctggggagaaacccaaggtacttttggagctggccttctcaaggaagcccagctccctgtgattgagaataaagtgtgcaatcgctatgagtttctgaatggaagagtccaatccaccgaactctgtgctgggcatttggccggaggcactgacagttgccagggtgacagtggaggtcctctggtttgcttcgagaaggacaaatacattttacaaggagtcacttcttggggtcttggctgtgcacgccccaataagcctggtgtctatgttcgtgtttcaaggtttgttacttggattgagggagtgatgagaaataattaattggacgggagacagagtgacgcactgactcacctagaggctggaacgtgggtagggatttagcatgctggaaataactggcagtaatcaaacgaagacactgtccccagctaccagctacgccaaacctcggcattttttgtgttattttctgactgctggattctgtagtaaggtgacatagctatgacatttgttaaaaataaactctgtacttaactttgatttgagtaaattttggttttggtcttcaacattttcatgctctttgttcaccccaccaatttttaaatgggcagatggggggatttagctgcttttgataaggaacagctgcacaaaggactgagcaggctgcaaggtcacagaggggagagccaagaagttgtccacgcatttacctcatcagctaacgagggcttgacatgcatttttactgtctttattcctgacactgagatgaatgttttcaaagctgcaacatgtatggggagtcatgcaaaccgattctgttattgggaatgaaatctgtcaccgactgcttgacttgagcccaggggacacggagcagagagctgtatatgatggagtgaaccggtccatggatgtgtaacacaagaccaactgagagtctgaatgttattctggggcacacgtgagtctaggattggtgccaagagcatgtaaatgaacaacaagcaaatattgaaggtggaccacttatttcccattgctaattgcctgcccggttttgaaacagtctgcagtacacacggtcacaggagaatgacctgtgggagagatacatgtttagaaggaagagaaaggacaaaggcacacgttttaccatttaaaatattgttaccaaacaaaaatatccattcaaaatacaatttaacaatgcaacagtcatcttacagcagagaaatgcagagaaaagcaaaactgcaagtgactgtgaataaagggtgaatgtagtctcaaatcctcaaa

SEQ ID NO: 174 - DNA, 3863 bp, Homo sapiens
atttaagagccaactgtcttgtctttcccgagtccgtttgaggaagtccccgaggcgcacagagcaagcccacgcgagggcacctctggaggggagcgcctgcaggaccttgtaaagtcaaaaatgtcagaaacttccaggaccgcctttggaggcagaagagcagttccacccaataactctaatgcagcggaagatgacctgcccacagtggagcttcagggcgtggtgccccggggcgtcaacctgcaagagtttcttaatgtcacgagcgttcacctgttcaaggagagatgggacactaacaaggtggaccaccacactgacaagtatgaaaacaacaagctgattgtccgcagagggcagtctttctatgtgcagattgacttcagtcgtccatatgaccccagaagggatctcttcagggtggaatacgtcattggtcgctacccacaggagaacaagggaacctacatcccagtgcctatagtctcagagttacaaagtggaaagtggggggccaagattgtcatgagagaggacaggtctgtgcggctgtccatccagtcttcccccaaatgtattgtggggaaattccgcatgtatgttgctgtctggactccctatggcgtacttcgaaccagtcgaaacccagaaacagacacgtacattctcttcaatccttggtgtgaagatgatgctgtgtatctggacaatgagaaagaaagagaagagtatgtcctgaatgacatcggggtaattttttatggagaggtcaatgacatcaagaccagaagctggagctatggtcagtttgaagatggcatcctggacacttgcctgtatgtgatggacagagcacaaatggacctctctggaagagggaatcccatcaaagtcagccgtgtggggtctgcaatggtgaatgccaaagatgacgaaggtgtcctcgttggatcctgggacaatatctatgcctatggcgtccccccatcggcctggactggaagcgttgacattctattggaataccggagctctgagaatccagtccggtatggccaatgctgggtttttgctggtgtctttaacacatttttacgatgccttggaataccagcaagaattgttaccaattatttctctgcccatgataatgatgccaatttgcaaatggacatcttcctggaagaagatgggaacgtgaattccaaactcaccaaggattcagtgtggaactaccactgctggaatgaagcatggatgacaaggcctgaccttcctgttggatttggaggctggcaagctgtggacagcaccccccaggaaaatagcgatggcatgtatcggtgtggccccgcctcggttcaagccatcaagcacggccatgtctgcttccaatttgatgcaccttttgtttttgcagaggtcaacagcgacctcatttacattacagctaagaaagatggcactcatgtggtggaaaatgtggatgccacccacattgggaaattaattgtgaccaaacaaattggaggagatggcatgatggatattactgatacttacaaattccaagaaggtcaagaagaagagagattggccctagaaactgccctgatgtacggagctaaaaagcccctcaacacagaaggtgtcatgaaatcaaggtccaacgttgacatggactttgaagtggaaaatgctgtgctgggaaaagacttcaagctctccatcaccttccggaacaacagccacaaccgttacaccatcacagcttatctctcagccaacatcaccttctacaccggggtcccgaaggcagaattcaagaaggagacgttcgacgtgacgctggagcccttgtccttcaagaaagaggcggtgctgatccaagccggcgagtacatgggtcagctgctggaacaagcgtccctgcacttctttgtcacagctcgcatcaatgagaccagggatgttctggccaagcaaaagtccaccgtgctaaccatccctgagatcatcatcaaggtccgtggcactcaggtagttggttctgacatgactgtgacagttgagtttaccaatcctttaaaagaaaccctgcgaaatgtctgggtacacctggatggtcctggagtaacaagaccaatgaagaagatgttccgtgaaatccggcccaactccaccgtgcagtgggaagaagtgtgccggccctgggtctctgggcatcggaagctgatagccagcatgagcagtgactccctgagacatgtgtatggcgagctggacgtgcagattcaaagacgaccttccatgtgaatgcacaggaagctgagatgaaccctggcatttggcctcttgtagtcttggctaaggaaattctaacgcaaaaatagctcttgctttgacttaggtgtgaagacccagacaggactgcagagggctccagagtggagatcccacatatttcaaaaacatgcttttccaaacccaggctattcggcaaggaagttagtttttaatctctccaccttccaaagagtgctaagcattagctttaattaagctctcatagctcataagagtaacagtcatcatttatcatcacaaatggctacatctccaaatatcagtgggctctcttaccagggagatttgctcaatacctggcctcatttaaaacaagacttcagattccccactcagccttttgggaataatagcacatgatttgggctctagaattccagtcccctttctcggggtcaggttctaccctccatgtgagaatatttttcccaggactagagcacaacataatttttatttttggcaaagccagaaaaagatctttcattttgcacctgcagccaagcaaatgcctgccaaattttagatttaccttgttagaagaggtggccccatattaacaaattgcatttgtgggaaacttaaccacctacaaggagataagaaagcaggtgcaacactcaagtctattgaataatgtagttttgtgatgcattttatagaatgtgtcacactgtggcctgatcagcaggagccaatatcccttactttaaccctttctgggatgcaatactaggaagtaaagtgaagaatttatctctttagttagtgattatatttcacccatctctcaggaatcatctcctttgcagaatgatgcaggttcaggtcccctttcagagatataataagcccaacaagttgaagaagctggcggatctagtgaccagatatatagaaggactgcagccactgattctctcttgtccttcacatcacccatgttgagacctcagcttggcactcaggtgctgaagggtaatatggactcagccttgcaaatagccagtgctagttctgacccaaccacagaggatgctgacatcatttgtattatgttccaaggctactacagagaaggctgcctgctatgtatttgcaaggctgatttatggtcagaatttccctctgatatgtctagggtgtgatttaggtcagtagactgtgattcttagcaaaaaatgaacagtgataagtatactgggggcaaaatcagaatggaatgctctggtctatataaccacatttctaagcctttgagactgttcctgagccttcagcactaacctatgagggtgagctggtcccctctatatatacatcatacttaactttactaagtaatctcacagcatttgccaagtctcccaatatccaattttaaaatgaaatgcattttgctagacagttaaactggcttaacttagtatattattattaattacaatgtaatagaagcttaaaataaagttaaactgattatatttgca

SEQ ID NO: 175 - DNA, 8838 bp, Homo sapiens
gtggcagctcacagctattgtggtgggaaagggagggtggttggtggatgtcacagcttgggctttatctcccccagcagtggggactccacagcccctgggctacataacagcaagacagtccggagctgtagcagacctgattgagcctttgcagcagctgagagcatggcctagggtgggcggcaccattgtccagcagctgagtttcccagggaccttggagatagccgcagccctcatttgcaggggaagatgattcctgccagatttgccggggtgctgcttgctctggccctcattttgccagggaccctttgtgcagaaggaactcgcggcaggtcatccacggcccgatgcagccttttcggaagtgacttcgtcaacacctttgatgggagcatgtacagctttgcgggatactgcagttacctcctggcagggggctgccagaaacgctccttctcgattattggggacttccagaatggcaagagagtgagcctctccgtgtatcttggggaattttttgacatccatttgtttgtcaatggtaccgtgacacagggggaccaaagagtctccatgccctatgcctccaaagggctgtatctagaaactgaggctgggtactacaagctgtccggtgaggcctatggctttgtggccaggatcgatggcagcggcaactttcaagtcctgctgtcagacagatacttcaacaagacctgcgggctgtgtggcaactttaacatctttgctgaagatgactttatgacccaagaagggaccttgacctcggacccttatgactttgccaactcatgggctctgagcagtggagaacagtggtgtgaacgggcatctcctcccagcagctcatgcaacatctcctctggggaaatgcagaagggcctgtgggagcagtgccagcttctgaagagcacctcggtgtttgcccgctgccaccctctggtggaccccgagccttttgtggccctgtgtgagaagactttgtgtgagtgtgctggggggctggagtgcgcctgccctgccctcctggagtacgcccggacctgtgcccaggagggaatggtgctgtacggctggaccgaccacagcgcgtgcagcccagtgtgccctgctggtatggagtataggcagtgtgtgtccccttgcgccaggacctgccagagcctgcacatcaatgaaatgtgtcaggagcgatgcgtggatggctgcagctgccctgagggacagctcctggatgaaggcctctgcgtggagagcaccgagtgtccctgcgtgcattccggaaagcgctaccctcccggcacctccctctctcgagactgcaacacctgcatttgccgaaacagccagtggatctgcagcaatgaagaatgtccaggggagtgccttgtcacaggtcaatcacacttcaagagctttgacaacagatacttcaccttcagtgggatctgccagtacctgctggcccgggattgccaggaccactccttctccattgtcattgagactgtccagtgtgctgatgaccgcgacgctgtgtgcacccgctccgtcaccgtccggctgcctggcctgcacaacagccttgtgaaactgaagcatggggcaggagttgccatggatggccaggacgtccagctccccctcctgaaaggtgacctccgcatccagcatacagtgacggcctccgtgcgcctcagctacggggaggacctgcagatggactgggatggccgcgggaggctgctggtgaagctgtcccccgtctatgccgggaagacctgcggcctgtgtgggaattacaatggcaaccagggcgacgacttccttaccccctctgggctggcggagccccgggtggaggacttcgggaacgcctggaagctgcacggggactgccaggacctgcagaagcagcacagcgatccctgcgccctcaacccgcgcatgaccaggttctccgaggaggcgtgcgcggtcctgacgtcccccacattcgaggcctgccatcgtgccgtcagcccgctgccctacctgcggaactgccgctacgacgtgtgctcctgctcggacggccgcgagtgcctgtgcggcgccctggccagctatgccgcggcctgcgcggggagaggcgtgcgcgtcgcgtggcgcgagccaggccgctgtgagctgaactgcccgaaaggccaggtgtacctgcagtgcgggaccccctgcaacctgacctgccgctctctctcttacccggatgaggaatgcaatgaggcctgcctggagggctgcttctgccccccagggctctacatggatgagaggggggactgcgtgcccaaggcccagtgcccctgttactatgacggtgagatcttccagccagaagacatcttctcagaccatcacaccatgtgctactgtgaggatggcttcatgcactgtaccatgagtggagtccccggaagcttgctgcctgacgctgtcctcagcagtcccctgtctcatcgcagcaaaaggagcctatcctgtcggccccccatggtcaagctggtgtgtcccgctgacaacctgcgggctgaagggctcgagtgtaccaaaacgtgccagaactatgacctggagtgcatgagcatgggctgtgtctctggctgcctctgccccccgggcatggtccggcatgagaacagatgtgtggccctggaaaggtgtccctgcttccatcagggcaaggagtatgcccctggagaaacagtgaagattggctgcaacacttgtgtctgtcgggaccggaagtggaactgcacagaccatgtgtgtgatgccacgtgctccacgatcggcatggcccactacctcaccttcgacgggctcaaatacctgttccccggggagtgccagtacgttctggtgcaggattactgcggcagtaaccctgggacctttcggatcctagtggggaataagggatgcagccacccctcagtgaaatgcaagaaacgggtcaccatcctggtggagggaggagagattgagctgtttgacggggaggtgaatgtgaagaggcccatgaaggatgagactcactttgaggtggtggagtctggccggtacatcattctgctgctgggcaaagccctctccgtggtctgggaccgccacctgagcatctccgtggtcctgaagcagacataccaggagaaagtgtgtggcctgtgtgggaattttgatggcatccagaacaatgacctcaccagcagcaacctccaagtggaggaagaccctgtggactttgggaactcctggaaagtgagctcgcagtgtgctgacaccagaaaagtgcctctggactcatcccctgccacctgccataacaacatcatgaagcagacgatggtggattcctcctgtagaatccttaccagtgacgtcttccaggactgcaacaagctggtggaccccgagccatatctggatgtctgcatttacgacacctgctcctgtgagtccattggggactgcgcctgcttctgcgacaccattgctgcctatgcccacgtgtgtgcccagcatggcaaggtggtgacctggaggacggccacattgtgcccccagagctgcgaggagaggaatctccgggagaacgggtatgagtgtgagtggcgctataacagctgtgcacctgcctgtcaagtcacgtgtcagcaccctgagccactggcctgccctgtgcagtgtgtggagggctgccatgcccactgccctccagggaaaatcctggatgagcttttgcagacctgcgttgaccctgaagactgtccagtgtgtgaggtggctggccggcgttttgcctcaggaaagaaagtcaccttgaatcccagtgaccctgagcactgccagatttgccactgtgatgttgtcaacctcacctgtgaagcctgccaggagccgggaggcctggtggtgcctcccacagatgccccggtgagccccaccactctgtatgtggaggacatctcggaaccgccgttgcacgatttctactgcagcaggctactggacctggtcttcctgctggatggctcctccaggctgtccgaggctgagtttgaagtgctgaaggcctttgtggtggacatgatggagcggctgcgcatctcccagaagtgggtccgcgtggccgtggtggagtaccacgacggctcccacgcctacatcgggctcaaggaccggaagcgaccgtcagagctgcggcgcattgccagccaggtgaagtatgcgggcagccaggtggcctccaccagcgaggtcttgaaatacacactgttccaaatcttcagcaagatcgaccgccctgaagcctcccgcatcaccctgctcctgatggccagccaggagccccaacggatgtcccggaactttgtccgctacgtccagggcctgaagaagaagaaggtcattgtgatcccggtgggcattgggccccatgccaacctcaagcagatccgcctcatcgagaagcaggcccctgagaacaaggccttcgtgctgagcagtgtggatgagctggagcagcaaagggacgagatcgttagctacctctgtgaccttgcccctgaagcccctcctcctactctgccccccgacatggcacaagtcactgtgggcccggggctcttgggggtttcgaccctggggcccaagaggaactccatggttctggatgtggcgttcgtcctggaaggatcggacaaaattggtgaagccgacttcaacaggagcaaggagttcatggaggaggtgattcagcggatggatgtgggccaggacagcatccacgtcacggtgctgcagtactcctacatggtgactgtggagtaccccttcagcgaggcacagtccaaaggggacatcctgcagcgggtgcgagagatccgctaccagggcggcaacaggaccaacactgggctggccctgcggtacctctctgaccacagcttcttggtcagccagggtgaccgggagcaggcgcccaacctggtctacatggtcaccggaaatcctgcctctgatgagatcaagaggctgcctggagacatccaggtggtgcccattggagtgggccctaatgccaacgtgcaggagctggagaggattggctggcccaatgcccctatcctcatccaggactttgagacgctcccccgagaggctcctgacctggtgctgcagaggtgctgctccggagaggggctgcagatccccaccctctcccctgcacctgactgcagccagcccctggacgtgatccttctcctggatggctcctccagtttcccagcttcttattttgatgaaatgaagagtttcgccaaggctttcatttcaaaagccaatatagggcctcgtctcactcaggtgtcagtgctgcagtatggaagcatcaccaccattgacgtgccatggaacgtggtcccggagaaagcccatttgctgagccttgtggacgtcatgcagcgggagggaggccccagccaaatcggggatgccttgggctttgctgtgcgatacttgacttcagaaatgcatggtgccaggccgggagcctcaaaggcggtggtcatcctggtcacggacgtctctgtggattcagtggatgcagcagctgatgccgccaggtccaacagagtgacagtgttccctattggaattggagatcgctacgatgcagcccagctacggatcttggcaggcccagcaggcgactccaacgtggtgaagctccagcgaatcgaagacctccctaccatggtcaccttgggcaattccttcctccacaaactgtgctctggatttgttaggatttgcatggatgaggatgggaatgagaagaggcccggggacgtctggaccttgccagaccagtgccacaccgtgacttgccagccagatggccagaccttgctgaagagtcatcgggtcaactgtgaccgggggctgaggccttcgtgccctaacagccagtcccctgttaaagtggaagagacctgtggctgccgctggacctgcccctgcgtgtgcacaggcagctccactcggcacatcgtgacctttgatgggcagaatttcaagctgactggcagctgttcttatgtcctatttcaaaacaaggagcaggacctggaggtgattctccataatggtgcctgcagccctggagcaaggcagggctgcatgaaatccatcgaggtgaagcacagtgccctctccgtcgagctgcacagtgacatggaggtgacggtgaatgggagactggtctctgttccttacgtgggtgggaacatggaagtcaacgtttatggtgccatcatgcatgaggtcagattcaatcaccttggtcacatcttcacattcactccacaaaacaatgagttccaactgcagctcagccccaagacttttgcttcaaagacgtatggtctgtgtgggatctgtgatgagaacggagccaatgacttcatgctgagggatggcacagtcaccacagactggaaaacacttgttcaggaatggactgtgcagcggccagggcagacgtgccagcccatcctggaggagcagtgtcttgtccccgacagctcccactgccaggtcctcctcttaccactgtttgctgaatgccacaaggtcctggctccagccacattctatgccatctgccagcaggacagttgccaccaggagcaagtgtgtgaggtgatcgcctcttatgcccacctctgtcggaccaacggggtctgcgttgactggaggacacctgatttctgtgctatgtcatgcccaccatctctggtctacaaccactgtgagcatggctgtccccggcactgtgatggcaacgtgagctcctgtggggaccatccctccgaaggctgtttctgccctccagataaagtcatgttggaaggcagctgtgtccctgaagaggcctgcactcagtgcattggtgaggatggagtccagcaccagttcctggaagcctgggtcccggaccaccagccctgtcagatctgcacatgcctcagcgggcggaaggtcaactgcacaacgcagccctgccccacggccaaagctcccacgtgtggcctgtgtgaagtagcccgcctccgccagaatgcagaccagtgctgccccgagtatgagtgtgtgtgtgacccagtgagctgtgacctgcccccagtgcctcactgtgaacgtggcctccagcccacactgaccaaccctggcgagtgcagacccaacttcacctgcgcctgcaggaaggaggagtgcaaaagagtgtccccaccctcctgccccccgcaccgtttgcccacccttcggaagacccagtgctgtgatgagtatgagtgtgcctgcaactgtgtcaactccacagtgagctgtccccttgggtacttggcctcaactgccaccaatgactgtggctgtaccacaaccacctgccttcccgacaaggtgtgtgtccaccgaagcaccatctaccctgtgggccagttctgggaggagggctgcgatgtgtgcacctgcaccgacatggaggatgccgtgatgggcctccgcgtggcccagtgctcccagaagccctgtgaggacagctgtcggtcgggcttcacttacgttctgcatgaaggcgagtgctgtggaaggtgcctgccatctgcctgtgaggtggtgactggctcaccgcggggggactcccagtcttcctggaagagtgtcggctcccagtgggcctccccggagaacccctgcctcatcaatgagtgtgtccgagtgaaggaggaggtctttatacaacaaaggaacgtctcctgcccccagctggaggtccctgtctgcccctcgggctttcagctgagctgtaagacctcagcgtgctgcccaagctgtcgctgtgagcgcatggaggcctgcatgctcaatggcactgtcattgggcccgggaagactgtgatgatcgatgtgtgcacgacctgccgctgcatggtgcaggtgggggtcatctctggattcaagctggagtgcaggaagaccacctgcaacccctgccccctgggttacaaggaagaaaataacacaggtgaatgttgtgggagatgtttgcctacggcttgcaccattcagctaagaggaggacagatcatgacactgaagcgtgatgagacgctccaggatggctgtgatactcacttctgcaaggtcaatgagagaggagagtacttctgggagaagagggtcacaggctgcccaccctttgatgaacacaagtgtctggctgagggaggtaaaattatgaaaattccaggcacctgctgtgacacatgtgaggagcctgagtgcaacgacatcactgccaggctgcagtatgtcaaggtgggaagctgtaagtctgaagtagaggtggatatccactactgccagggcaaatgtgccagcaaagccatgtactccattgacatcaacgatgtgcaggaccagtgctcctgctgctctccgacacggacggagcccatgcaggtggccctgcactgcaccaatggctctgttgtgtaccatgaggttctcaatgccatggagtgcaaatgctcccccaggaagtgcagcaagtgaggctgctgcagctgcatgggtgcctgctgctgcctgccttggcctgatggccaggccagagtgctgccagtcctctgcatgttctgctcttgtgcccttctgagcccacaataaaggctgagctcttatcttgcaaaaggc

SEQ ID NO: 176 - DNA, 2627 bp, Homo sapiens
gcctacctcttccaggctgcgtggccggggcgtcatctcgcgcttccaactgccctgtaaccaccaactgccattattccggctgggacccaggacttcaagccatgtggcgcgtcttgtttctgctcagcgggctcggcgggctgcggatggacagtaattttgatagtttacctgtgcaaattacagttccggagaaaatacggtcaataataaaggaaggaattgaatcgcaggcatcctacaaaattgtaattgaagggaaaccatatactgtgaatttaatgcaaaaaaactttttaccccataattttagagtttacagttatagtggcacaggaattatgaaaccacttgaccaagattttcagaatttctgccactaccaagggtatattgaaggttatccaaaatctgtggtgatggttagcacatgtactggactcaggggcgtactacagtttgaaaatgttagttatggaatagaacccctggagtcttcagttggctttgaacatgtaatttaccaagtaaaacataagaaagcagatgtttccttatataatgagaaggatattgaatcaagagatctgtcctttaaattacaaagcgtagagtataatcatatggggtctgatacaactgttgtcgctcaaaaagttttccagttgattggattgacgaatgctatttttgtttcatttaatattacaattattctgtcttcattggagctttggatagatgaaaataaaattgcaaccactggagaagctaatgagttattacacacatttttaagatggaaaacatcttatcttgttttacgtcctcatgatgtggcatttttacttgtttacagagaaaagtcaaattatgttggtgcaacctttcaagggaagatgtgtgatgcaaactatgcaggaggtgttgttctgcaccccagaaccataagtctggaatcacttgcagttattttagctcaattattgagccttagtatggggatcacttatgatgacattaacaaatgccagtgctcaggagctgtctgcattatgaatccagaagcaattcatttcagtggtgtgaagatctttagtaactgcagcttcgaagactttgcacattttatttcaaagcagaagtcccagtgtcttcacaatcagcctcgcttagatccttttttcaaacagcaagcagtgtgtggtaatgcaaagctggaagcaggagaggagtgtgactgtgggactgaacaggattgtgcccttattggagaaacatgctgtgatattgccacatgtagatttaaagccggttcaaactgtgctgaaggaccatgctgcgaaaactgtctatttatgtcaaaagaaagaatgtgtaggccttcctttgaagaatgcgacctccctgaatattgcaatggatcatctgcatcatgcccagaaaaccactatgttcagactgggcatccgtgtggactgaatcaatggatctgtatagatggagtttgtatgagtggggataaacaatgtacagacacatttggcaaagaagtagagtttggcccttcagaatgttattctcaccttaattcaaagactgatgtatctggaaactgtggtataagtgattcaggatacacacagtgtgaagctgacaatctgcagtgcggaaaattaatatgtaaatatgtaggtaaatttttattacaaattccaagagccactattatttatgccaacataagtggacatctctgcattgctgtggaatttgccagtgatcatgcagacagccaaaagatgtggataaaagatggaacttcttgtggttcaaataaggtttgcaggaatcaaagatgtgtgagttcttcatacttgggttatgattgtactactgacaaatgcaatgatagaggtgtatgcaataacaaaaagcactgtcactgtagtgcttcatatttacctccagattgctcagttcaatcagatctatggcctggtgggagtattgacagtggcaattttccacctgtagctataccagccagactccctgaaaggcgctacattgagaacatttaccattccaaaccaatgagatggccatttttcttattcattcctttctttattattttctgtgtactgattgctataatggtgaaagttaatttccaaaggaaaaaatggagaactgaggactattcaagcgatgagcaacctgaaagtgagagtgaacctaaagggtagtctggacaacagagatgccatgatatcacttcttctagagtaattatctgtgatggatggacacaaaaaaatggaaagaaaagaatgtacattacctggtttcctgggattcaaacctgcatattgtgattttaatttgaccagaaaatatgatatatatgtataatttcacagataatttacttatttaaaaatgcatgataatgagttttacattacaaatttctgtttttttaaagttatcttacgctatttctgttggttagtagacactaattctgtcagtaggggcatggtataaggaaatatcataatgtaatgaggtggtactatgattaaaagccactgttacatttcaaaaaaaaaaaaaaa

SEQ ID NO: 177 - DNA, 3249 bp, Homo sapiens; identical to SEQ ID NO: 164

SEQ ID NO: 178 - DNA, 5927 bp, Homo sapiens
tcgtcggagcagacgggagtttctcctcggggtcggagcaggaggcacgcggagtgtgaggccacgcatgagcggacgctaaccccctccccagccacaaagagtctacatgtctagggtctagacatgttcagctttgtggacctccggctcctgctcctcttagcggccaccgccctcctgacgcacggccaagaggaaggccaagtcgagggccaagacgaagacatcccaccaatcacctgcgtacagaacggcctcaggtaccatgaccgagacgtgtggaaacccgagccctgccggatctgcgtctgcgacaacggcaaggtgttgtgcgatgacgtgatctgtgacgagaccaagaactgccccggcgccgaagtccccgagggcgagtgctgtcccgtctgccccgacggctcagagtcacccaccgaccaagaaaccaccggcgtcgagggacccaagggagacactggcccccgaggcccaaggggacccgcaggcccccctggccgagatggcatccctggacagcctggacttcccggaccccccggaccccccggacctcccggaccccctggcctcggaggaaactttgctccccagctgtcttatggctatgatgagaaatcaaccggaggaatttccgtgcctggccccatgggtccctctggtcctcgtggtctccctggcccccctggtgcacctggtccccaaggcttccaaggtccccctggtgagcctggcgagcctggagcttcaggtcccatgggtccccgaggtcccccaggtccccctggaaagaatggagatgatggggaagctggaaaacctggtcgtcctggtgagcgtgggcctcctgggcctcagggtgctcgaggattgcccggaacagctggcctccctggaatgaagggacacagaggtttcagtggtttggatggtgccaagggagatgctggtcctgctggtcctaagggtgagcctggcagccctggtgaaaatggagctcctggtcagatgggcccccgtggcctgcctggtgagagaggtcgccctggagcccctggccctgctggtgctcgtggaaatgatggtgctactggtgctgccgggccccctggtcccaccggccccgctggtcctcctggcttccctggtgctgttggtgctaagggtgaagctggtccccaagggccccgaggctctgaaggtccccagggtgtgcgtggtgagcctggcccccctggccctgctggtgctgctggccctgctggaaaccctggtgctgatggacagcctggtgctaaaggtgccaatggtgctcctggtattgctggtgctcctggcttccctggtgcccgaggcccctctggaccccagggccccggcggccctcctggtcccaagggtaacagcggtgaacctggtgctcctggcagcaaaggagacactggtgctaagggagagcctggccctgttggtgttcaaggaccccctggccctgctggagaggaaggaaagcgaggagctcgaggtgaacccggacccactggcctgcccggaccccctggcgagcgtggtggacctggtagccgtggtttccctggcgcagatggtgttgctggtcccaagggtcccgctggtgaacgtggttctcctggccctgctggccccaaaggatctcctggtgaagctggtcgtcccggtgaagctggtctgcctggtgccaagggtctgactggaagccctggcagccctggtcctgatggcaaaactggcccccctggtcccgccggtcaagatggtcgccccggacccccaggcccacctggtgcccgtggtcaggctggtgtgatgggattccctggacctaaaggtgctgctggagagcccggcaaggctggagagcgaggtgttcccggaccccctggcgctgtcggtcctgctggcaaagatggagaggctggagctcagggaccccctggccctgctggtcccgctggcgagagaggtgaacaaggccctgctggctcccccggattccagggtctccctggtcctgctggtcctccaggtgaagcaggcaaacctggtgaacagggtgttcctggagaccttggcgcccctggcccctctggagcaagaggcgagagaggtttccctggcgagcgtggtgtgcaaggtccccctggtcctgctggtccccgaggggccaacggtgctcccggcaacgatggtgctaagggtgatgctggtgcccctggagctcccggtagccagggcgcccctggccttcagggaatgcctggtgaacgtggtgcagctggtcttccagggcctaagggtgacagaggtgatgctggtcccaaaggtgctgatggctctcctggcaaagatggcgtccgtggtctgactggccccattggtcctcctggccctgctggtgcccctggtgacaagggtgaaagtggtcccagcggccctgctggtcccactggagctcgtggtgcccccggagaccgtggtgagcctggtccccccggccctgctggctttgctggcccccctggtgctgacggccaacctggtgctaaaggcgaacctggtgatgctggtgctaaaggcgatgctggtccccctggccctgccggacccgctggaccccctggccccattggtaatgttggtgctcctggagccaaaggtgctcgcggcagcgctggtccccctggtgctactggtttccctggtgctgctggccgagtcggtcctcctggcccctctggaaatgctggaccccctggccctcctggtcctgctggcaaagaaggcggcaaaggtccccgtggtgagactggccctgctggacgtcctggtgaagttggtccccctggtccccctggccctgctggcgagaaaggatcccctggtgctgatggtcctgctggtgctcctggtactcccgggcctcaaggtattgctggacagcgtggtgtggtcggcctgcctggtcagagaggagagagaggcttccctggtcttcctggcccctctggtgaacctggcaaacaaggtccctctggagcaagtggtgaacgtggtccccctggtcccatgggcccccctggattggctggaccccctggtgaatctggacgtgagggggctcctggtgccgaaggttcccctggacgagacggttctcctggcgccaagggtgaccgtggtgagaccggccccgctggaccccctggtgctcctggtgctcctggtgcccctggccccgttggccctgctggcaagagtggtgatcgtggtgagactggtcctgctggtcccgccggtcctgtcggccctgttggcgcccgtggccccgccggaccccaaggcccccgtggtgacaagggtgagacaggcgaacagggcgacagaggcataaagggtcaccgtggcttctctggcctccagggtccccctggccctcctggctctcctggtgaacaaggtccctctggagcctctggtcctgctggtccccgaggtccccctggctctgctggtgctcctggcaaagatggactcaacggtctccctggccccattgggccccctggtcctcgcggtcgcactggtgatgctggtcctgttggtccccccggccctcctggacctcctggtccccctggtcctcccagcgctggtttcgacttcagcttcctgccccagccacctcaagagaaggctcacgatggtggccgctactaccgggctgatgatgccaatgtggttcgtgaccgtgacctcgaggtggacaccaccctcaagagcctgagccagcagatcgagaacatccggagcccagagggcagccgcaagaaccccgcccgcacctgccgtgacctcaagatgtgccactctgactggaagagtggagagtactggattgaccccaaccaaggctgcaacctggatgccatcaaagtcttctgcaacatggagactggtgagacctgcgtgtaccccactcagcccagtgtggcccagaagaactggtacatcagcaagaaccccaaggacaagaggcatgtctggttcggcgagagcatgaccgatggattccagttcgagtatggcggccagggctccgaccctgccgatgtggccatccagctgaccttcctgcgcctgatgtccaccgaggcctcccagaacatcacctaccactgcaagaacagcgtggcctacatggaccagcagactggcaacctcaagaaggccctgctcctccagggctccaacgagatcgagatccgcgccgagggcaacagccgcttcacctacagcgtcactgtcgatggctgcacgagtcacaccggagcctggggcaagacagtgattgaatacaaaaccaccaagacctcccgcctgcccatcatcgatgtggcccccttggacgttggtgccccagaccaggaattcggcttcgacgttggccctgtctgcttcctgtaaactccctccatcccaacctggctccctcccacccaaccaactttccccccaacccggaaacagacaagcaacccaaactgaaccccctcaaaagccaaaaaatgggagacaatttcacatggactttggaaaatatttttttcctttgcattcatctctcaaacttagtttttatctttgaccaaccgaacatgaccaaaaaccaaaagtgcattcaaccttaccaaaaaaaaaaaaaaaaaaagaataaataaataactttttaaaaaaggaagcttggtccacttgcttgaagacccatgcgggggtaagtccctttctgcccgttgggcttatgaaaccccaatgctgccctttctgctcctttctccacaccccccttggggcctcccctccactccttcccaaatctgtctccccagaagacacaggaaacaatgtattgtctgcccagcaatcaaaggcaatgctcaaacacccaagtggcccccaccctcagcccgctcctgcccgcccagcacccccaggccctgggggacctggggttctcagactgccaaagaagccttgccatctggcgctcccatggctcttgcaacatctccccttcgtttttgagggggtcatgccgggggagccaccagcccctcactgggttcggaggagagtcaggaagggccacgacaaagcagaaacatcggatttggggaacgcgtgtcaatcccttgtgccgcagggctgggcgggagagactgttctgttccttgtgtaactgtgttgctgaaagactacctcgttcttgtcttgatgtgtcaccggggcaactgcctgggggcggggatgggggcagggtggaagcggctccccattttataccaaaggtgctacatctatgtgatgggtggggtggggagggaatcactggtgctatagaaattgagatgcccccccaggccagcaaatgttcctttttgttcaaagtctatttttattccttgatatttttctttttttttttttttttttgtggatggggacttgtgaatttttctaaaggtgctatttaacatgggaggagagcgtgtgcggctccagcccagcccgctgctcactttccaccctctctccacctgcctctggcttctcaggcctctgctctccgacctctctcctctgaaaccctcctccacagctgcagcccatcctcccggctccctcctagtctgtcctgcgtcctctgtccccgggtttcagagacaacttcccaaagcacaaagcagtttttccccctaggggtgggaggaagcaaaagactctgtacctattttgtatgtgtataataatttgagatgtttttaattattttgattgctggaataaagcatgtggaaatgacccaaacataa

SEQ ID NO: 179 - DNA, 4662 bp, Homo sapiens
tcagtggcgtcggaactgcaaagcacctgtgagcttgcggaagtcagttcagactccagcccgctccagcccggcccgacccgaccgcacccggcgcctgccctcgctcggcgtccccggccagccatgggcccttggagccgcagcctctcggcgctgctgctgctgctgcaggtctcctcttggctctgccaggagccggagccctgccaccctggctttgacgccgagagctacacgttcacggtgccccggcgccacctggagagaggccgcgtcctgggcagagtgaattttgaagattgcaccggtcgacaaaggacagcctatttttccctcgacacccgattcaaagtgggcacagatggtgtgattacagtcaaaaggcctctacggtttcataacccacagatccatttcttggtctacgcctgggactccacctacagaaagttttccaccaaagtcacgctgaatacagtggggcaccaccaccgccccccgccccatcaggcctccgtttctggaatccaagcagaattgctcacatttcccaactcctctcctggcctcagaagacagaagagagactgggttattcctcccatcagctgcccagaaaatgaaaaaggcccatttcctaaaaacctggttcagatcaaatccaacaaagacaaagaaggcaaggttttctacagcatcactggccaaggagctgacacaccccctgttggtgtctttattattgaaagagaaacaggatggctgaaggtgacagagcctctggatagagaacgcattgccacatacactctcttctctcacgctgtgtcatccaacgggaatgcagttgaggatccaatggagattttgatcacggtaaccgatcagaatgacaacaagcccgaattcacccaggaggtctttaaggggtctgtcatggaaggtgctcttccaggaacctctgtgatggaggtcacagccacagacgcggacgatgatgtgaacacctacaatgccgccatcgcttacaccatcctcagccaagatcctgagctccctgacaaaaatatgttcaccattaacaggaacacaggagtcatcagtgtggtcaccactgggctggaccgagagagtttccctacgtataccctggtggttcaagctgctgaccttcaaggtgaggggttaagcacaacagcaacagctgtgatcacagtcactgacaccaacgataatcctccgatcttcaatcccaccacgggcttggattttgaggccaagcagcagtacattctacacgtagcagtgacgaatgtggtaccttttgaggtctctctcaccacctccacagccaccgtcaccgtggatgtgctggatgtgaatgaagcccccatctttgtgcctcctgaaaagagagtggaagtgtccgaggactttggcgtgggccaggaaatcacatcctacactgcccaggagccagacacatttatggaacagaaaataacatatcggatttggagagacactgccaactggctggagattaatccggacactggtgccatttccactcgggctgagctggacagggaggattttgagcacgtgaagaacagcacgtacacagccctaatcatagctacagacaatggttctccagttgctactggaacagggacacttctgctgatcctgtctgatgtgaatgacaacgcccccataccagaacctcgaactatattcttctgtgagaggaatccaaagcctcaggtcataaacatcattgatgcagaccttcctcccaatacatctcccttcacagcagaactaacacacggggcgagtgccaactggaccattcagtacaacgacccaacccaagaatctatcattttgaagccaaagatggccttagaggtgggtgactacaaaatcaatctcaagctcatggataaccagaataaagaccaagtgaccaccttagaggtcagcgtgtgtgactgtgaaggggccgctggcgtctgtaggaaggcacagcctgtcgaagcaggattgcaaattcctgccattctggggattcttggaggaattcttgctttgctaattctgattctgctgctcttgctgtttcttcggaggagagcggtggtcaaagagcccttactgcccccagaggatgacacccgggacaacgtttattactatgatgaagaaggaggcggagaagaggaccaggactttgacttgagccagctgcacaggggcctggacgctcggcctgaagtgactcgtaacgacgttgcaccaaccctcatgagtgtcccccggtatcttccccgccctgccaatcccgatgaaattggaaattttattgatgaaaatctgaaagcggctgatactgaccccacagccccgccttatgattctctgctcgtgtttgactatgaaggaagcggttccgaagctgctagtctgagctccctgaactcctcagagtcagacaaagaccaggactatgactacttgaacgaatggggcaatcgcttcaagaagctggctgacatgtacggaggcggcgaggacgactaggggactcgagagaggcgggccccagacccatgtgctgggaaatgcagaaatcacgttgctggtggtttttcagctcccttcccttgagatgagtttctggggaaaaaaaagagactggttagtgatgcagttagtatagctttatactctctccactttatagctctaataagtttgtgttagaaaagtttcgacttatttcttaaagcttttttttttttcccatcactctttacatggtggtgatgtccaaaagatacccaaattttaatattccagaagaacaactttagcatcagaaggttcacccagcaccttgcagattttcttaaggaattttgtctcacttttaaaaagaaggggagaagtcagctactctagttctgttgttttgtgtatataattttttaaaaaaaatttgtgtgcttctgctcattactacactggtgtgtccctctgccttttttttttttttaagacagggtctcattctatcggccaggctggagtgcagtggtgcaatcacagctcactgcagccttgtcctcccaggctcaagctatccttgcacctcagcctcccaagtagctgggaccacaggcatgcaccactacgcatgactaattttttaaatatttgagacggggtctccctgtgttacccaggctggtctcaaactcctgggctcaagtgatcctcccatcttggcctcccagagtattgggattacagacatgagccactgcacctgcccagctccccaactccctgccattttttaagagacagtttcgctccatcgcccaggcctgggatgcagtgatgtgatcatagctcactgtaacctcaaactctggggctcaagcagttctcccaccagcctcctttttatttttttgtacagatggggtcttgctatgttgcccaagctggtcttaaactcctggcctcaagcaatccttctgccttggccccccaaagtgctgggattgtgggcatgagctgctgtgcccagcctccatgttttaatatcaactctcactcctgaattcagttgctttgcccaagataggagttctctgatgcagaaattattgggctcttttagggtaagaagtttgtgtctttgtctggccacatcttgactaggtattgtctactctgaagacctttaatggcttccctctttcatctcctgagtatgtaacttgcaatgggcagctatccagtgacttgttctgagtaagtgtgttcattaatgtttatttagctctgaagcaagagtgatatactccaggacttagaatagtgcctaaagtgctgcagccaaagacagagcggaactatgaaaagtgggcttggagatggcaggagagcttgtcattgagcctggcaatttagcaaactgatgctgaggatgattgaggtgggtctacctcatctctgaaaattctggaaggaatggaggagtctcaacatgtgtttctgacacaagatccgtggtttgtactcaaagcccagaatccccaagtgcctgcttttgatgatgtctacagaaaatgctggctgagctgaacacatttgcccaattccaggtgtgcacagaaaaccgagaatattcaaaattccaaatttttttcttaggagcaagaagaaaatgtggccctaaagggggttagttgaggggtagggggtagtgaggatcttgatttggatctctttttatttaaatgtgaatttcaacttttgacaatcaaagaaaagacttttgttgaaatagctttactgtttctcaagtgttttggagaaaaaaatcaaccctgcaatcactttttggaattgtcttgatttttcggcagttcaagctatatcgaatatagttctgtgtagagaatgtcactgtagttttgagtgtatacatgtgtgggtgctgataattgtgtattttctttgggggtggaaaaggaaaacaattcaagctgagaaaagtattctcaaagatgcatttttataaattttattaaacaattttgttaaaccattaaaaaaaaaaaaaaaaaaaaaaaaaaa

SEQ ID NO: 180 - DNA, 9657 bp, Homo sapiens
cggggccagggcagcgcggactcgcgtcccgtggagcgttccaggcgggcgcgcggctttctccccagacccaccgagtggcggcggaggcgagatgcgcgggggcgtgctcctggtcttgctgctgtgtgtcgccgcgcagtgccggcagagaggcctgtttcctgccattctcaatcttgccagcaatgctcacatcagcaccaatgccacctgtggcgagaaggggccggagatgttctgcaaacttgtggagcatgtgccaggtcggcccgtccgaaacccacagtgccggatctgtgatggcaacagcgcaaaccccagagaacgccatccaatatcacatgccatagatggcaccaataactggtggcaaagtcccagcattcagaatgggagagaatatcactgggtcacaatcactctggacttaagacaggtctttcaagttgcatatgtcatcattaaagctgccaatgcccctcgacctggaaactggattttggagcgttctctggatggcaccacgttcagcccctggcagtattatgcagtcagcgactcagagtgtttgtctcgttacaatataactccaagacgagggccacccacctacagggctgatgatgaagtgatctgcacctcctattattccagattggtgccacttgagcatggagagattcatacatcactcatcaatggcagaccaagcgctgacgatctttcacccaagttgttggaattcacttctgcacgatatattcgccttcgcttgcaacgcattagaacgctcaatgcagatctcatgacccttagccaccgggaacctaaagaactggatcctattgttaccagacgctattattattcaataaaggacatttctgttggaggcatgtgtatctgctatggccatgctagtagctgcccatgggatgaaactacaaagaaactgcagtgtcaatgtgagcataatacttgcggggagagctgtaacaggtgctgtcctgggtaccatcagcagccctggaggccgggaaccgtgtcctccggcaatacatgtgaagcatgtaattgtcacaataaagccaaagactgttactatgatgaaagtgttgcaaagcagaagaaaagtttgaatactgctggacagttcagaggaggaggggtttgcataaattgcttgcagaacaccatgggaatcaactgtgaaacctgtattgatggatattatagaccacacaaagtgtctccttatgaggatgagccttgccgcccctgtaattgtgaccctgtggggtccctcagttctgtctgtattaaggatgacctccattctgacttacacaatgggaagcagccaggtcagtgcccatgtaaggaaggttatacaggagaaaaatgtgatcgctgccaacttggctataaggattacccgacctgtgtctcctgtgggtgcaacccagtgggcagtgccagtgatgagccctgcacagggccctgtgtttgtaaggaaaacgttgaggggaaggcctgtgatcgctgcaagccaggattctataacttgaaggaaaaaaacccccggggctgctccgagtgcttctgctttggcgtttctgatgtctgcagcagcctctcttggcctgttggtcaggtaaacagtatgtccgggtggctggtcaccgacttgatcagtcccaggaagatcccgtctcagcaagatgcactaggcgggcgccatcaggtcagcatcaacaacaccgcggtcatgcagagactggctcccaagtactactgggcagcccccgaggcctaccttggaaataagctgactgcgtttggcggattcctgaaatacacggtgtcctacgatattccggtagagacggtagacagtaacctcatgtcgcatgctgacgtcatcattaagggaaacggactcactttaagcacacaggctgagggtctgtcattgcagccttatgaagagtacctaaacgtggttagacttgtgcctgaaaacttccaagattttcacagcaaaaggcagattgatcgtgaccagctgatgactgtccttgccaatgtgacacatcttttgatcagagccaactacaattctgcaaaaatggctctttacaggttggagtccgtctctctggacatagccagctctaatgccatcgacctggtggtggccgctgatgtggagcactgtgaatgtccgcaaggctacacagggacctcctgtgagtcgtgcctctctggctattaccgcgtggatggaatactctttggaggaatttgtcaaccctgtgaatgccacggccatgcagctgagtgtaatgttcacggcgtttgcattgcgtgtgcgcacaacaccaccggcgtccactgtgagcagtgcttgcccggcttctacggggagccttcccgagggacacctggggactgccagccctgcgcctgccctctcaccatagcctccaacaatttcagccccacctgccacctcaatgatggagatgaagtggtctgtgactggtgtgccccgggctactcaggagcttggtgtgagagatgtgcagatggttactatggaaacccaacagtgcctggcgaatcttgtgttccctgtgactgcagcggcaacgtggacccctcggaggctggtcactgtgactcagtcaccggggagtgcctgaagtgcctggggaacacagatggcgcccactgtgaaaggtgtgctgacgggttctatggggacgctgtgacagccaagaactgccgcgcctgtgaatgccatgtgaaaggctcccattctgccgtgtgccatcttgagaccgggctctgtgactgcaaaccaaacgtgactggacagcagtgtgaccagtgcttgcatggctattatgggctggactcaggccatggctgccggccctgcaactgcagcgtggcaggctccgtgtcagatggctgcacggatgaaggccagtgtcactgtgtcccaggtgtggcagggaaaaggtgtgacaggtgtgcccatggcttctacgcctaccaggatggtagctgtacaccctgtgactgcccacacactcagaatacctgcgacccagaaactggagagtgtgtctgcccccctcacacacagggtgtgaagtgtgaagaatgtgaggatgggcactggggctacgatgcggaggtggggtgccaggcctgcaattgcagtctcgtggggtcgactcatcatcggtgcgatgtggtcaccggccattgccagtgcaagtcaaaatttggtggccgggcctgcgatcagtgttccttgggttacagagactttcccgactgtgttccctgtgactgtgacctgagggggacgtcgggggacgcctgcaacctggagcagggtctctgcggctgtgtggaggaaaccggggcctgcccttgcaaggaaaatgtctttggtcctcagtgcaacgaatgtcgagagggcaccttcgctctccgcgcagacaaccccctgggctgcagcccgtgcttctgctccgggctgtcccacctctgctcagagctggaggactacgtgaggaccccagtaacgctgggctccgatcagcctcttctgcgtgtggtttctcagagtaacttgaggggcacgaccgagggggtttactaccaggcccccgacttcctgctggatgccgccaccgtccggcagcacatccgtgcagagccgttttactggcggctgccgcagcagttccaaggagaccagctcatggcctatggtggcaaactgaagtacagcgtggccttctattctttggatggcgtcggcacctccaattttgagcctcaagttctcatcaaaggtggtcggatcagaaagcaagtcatttacatggatgcaccagccccagagaatggagtgagacaggaacaagaagtagcaatgagagagaatttttggaaatattttaactctgtttctgaaaaacctgtcacgcgagaggattttatgtctgtcctcagcgatattgagtacatcctcatcaaggcatcgtatggtcaaggattacagcagagcagaatctcagacatttcaatggaggttggcagaaaggctgaaaagctgcacccagaagaagaggttgcatctcttttagagaattgtgtctgtcctcctggcactgtgggattctcatgtcaggactgcgcccctgggtaccacagagggaagctcccagcagggagtgacaggggaccacgccctctggttgctccttgtgttccctgcagttgcaacaaccacagtgacacctgtgaccccaacaccgggaagtgtctgaactgtggcgataacacagcaggtgaccattgtgatgtgtgtacttctggctactacgggaaggtgactggctcagcaagtgactgtgctctgtgtgcctgtcctcacagccctcctgccagttttagtcccacttgtgtcttggaaggggaccacgatttccgttgtgacgcctgtctcctgggctatgaaggaaaacactgtgaaaggtgctcctcaagctattatgggaaccctcaaacaccaggtggcagttgccagaagtgtgactgcaacccgcacggctctgtccacggtgactgtgaccgcacatctgggcagtgcgtttgcaggctgggggcctcggggctccggtgcgatgagtgtgaaccgaggcacattctgatggaaacagattgtgtttcctgtgatgatgagtgtgtaggtgtgctgctgaatgacttggatgagattggtgatgccgttctttctctgaacctcactggcattatccctgtcccatatggaattttgtcaaacctggaaaatacaactaaatatctccaggaatctttattaaaagaaaatatgcaaaaggacctgggaaaaattaagcttgaaggtgttgcagaagaaacggacaacctgcaaaagaagctcactaggatgttagcgagtacccaaaaggtgaatagggcaactgagagaatcttcaaggagagtcaagacctggccatagccattgagaggctgcagatgagcatcacagaaattatggaaaagacaactttaaatcagactttggatgaagatttcctactacccaattctactcttcagaacatgcaacagaatggtacatctttgctagaaatcatgcagataagagacttcacacagttgcaccaaaatgccacccttgaactcaaggctgctgaagatttattgtcacaaattcaggaaaattaccagaagccgctggaagaattggaggtattgaaagaagcagcaagccacgtcctttcaaagcacaacaatgaactaaaggcggctgaggcgctcgtgagggaagctgaggcaaagatgcaggaaagcaaccacctgctgctcatggtcaatgctaatctgagagaattcagtgataaaaagctgcatgttcaagaagaacaaaatctgacctcagagctcattgtccaaggaagaggattgatagatgctgctgctgcacaaacagatgctgtacaagatgctctagagcacttagaggatcaccaggataagctacttttatggtctgccaaaatcaggcaccacatagatgacctggtcatgcacatgtcccaaaggaacgcagtcgacctggtctacagagctgaggaccatgccgctgagttccagagactagcagatgttctgtacagtggccttgaaaacatcagaaatgtgtccctgaatgccaccagtgcagcctatgtccattacaacatccagagcctgattgaagaatcggaggaactggccagagatgctcacaggactgtgactgagacgagcctgctctcagaatcccttgtttctaacgggaaagcggccgtgcagcgcagctccagatttctaaaagaaggcaacaacctcagcaggaagcttccaggtattgcattggaactgagtgaattgagaaataagacaaacagatttcaagagaatgctgttgaaattaccaggcaaaccaatgaatcactcttgatacttagagcaattcctaaaggtataagagacaagggagccaaaaccaaagagctggccacgtctgcaagccagagcgcggtgagcacgctgagggacgtggcggggctgagccaggagctgctgaacacatctgccagcctgtccagggtcaacaccacattacgagagacacaccagcttctgcaggactccaccatggccactctgttggctggaagaaaagtcaaagacgtggaaattcaagccaaccttttgtttgatcggttgaagcctttgaagatgttagaggagaatctgagcagaaacctatcagaaattaaactgttgatcagccaggcccgcaaacaagcagcttctattaaagtcgccgtgtctgcagacagagattgcatccgggcctaccagcctcagatttcctctaccaactacaataccttaacactaaatgttaagacacaggaacccgataatcttctcttctacctcggtagcagcaccgcttctgatttccttgcagtggagatgcggcgagggagagtggccttcctgtgggacctgggctccgggtccacacgcttggagtttccagactttcccattgatgacaacagatggcacagtatccatgtagccagatttggaaacattggttcactgagtgtaaaggaaatgagctcaaatcaaaagtcaccaacaaaaacaagtaaatcccctgggacagctaatgttctggatgtaaacaattcaacactcatgtttgttggaggtcttggaggacaaatcaagaaatctcctgctgtgaaggttactcattttaaaggctgcttgggggaggccttcctgaatggaaaatccataggcctatggaactatattgaaagggaaggcaagtgccgtgggtgcttcggaagctcccagaatgaagacccttccttccattttgacgggagtgggtactctgtcgtggagaagtcacttccggctaccgtgacccagataatcatgctttttaataccttttcacctaatggacttcttctctacctgggttcatacggcacaaaagactttttatccatcgagctgtttcgtggcagagtgaaggttatgactgacctgggttcaggacccattacccttttgacagacagacgttataacaatggaacctggtacaaaattgccttccagcgaaaccggaagcaaggagtgctagcagttatcgatgcctataacaccagtaataaagaaaccaagcagggcgagactccgggagcatcttctgacctcaaccgcctagacaaggacccgatttatgtgggtggattaccaaggtcaagagttgtaaggagaggtgtcaccaccaaaagctttgtgggctgcatcaagaacctggaaatatccagatcaacctttgacttactcagaaattcctatggagtgagaaaaggctgtttactggagcccatccggagtgttagcttcctgaaaggcggctacattgaattgccacccaaatctttgtcaccagaatcagaatggctggtaacatttgccaccacgaacagcagtggcatcatcctggctgccctcggcggggatgtggagaagcggggtgatcgtgaggaagcacacgtgcccttcttttccgtcatgctgatcggaggcaacattgaggtacatgtcaatcctggggatgggacaggcctgagaaaagctctcctgcacgctcccacgggtacctgcagtgatggacaagcgcattccatctccttggtcaggaatcggagaattatcactgtccaattggatgagaacaatcctgtggaaatgaagttgggcacattagtagaaagcaggacgataaatgtgtccaatctgtacgtcgggggaattccagagggagaggggacgtcactgctcacaatgagaagatcgttccatggctgtatcaaaaacctgatcttcaatttggaacttttggatttcaacagtgcagttggccatgagcaagtcgacctggacacctgctggctgtcagaaaggcctaagctggctcccgatgcagaggacagcaagctcttgccagagccccgggcttttccagaacagtgtgtggtggatgcagctctggagtacgttcccggcgctcaccagtttggtctcacacaaaacagccatttcatcttgccttttaatcagtcggctgtcagaaagaagctctcggttgagctaagcatccgcacgttcgcctccagcggcctgatttactacatggctcatcagaaccaagcagactacgctgtgctccagctgcacgggggccgcctccacttcatgtttgaccttggcaaaggcagaacaaaggtctctcaccctgcactgctcagtgatggcaagtggcacacggtcaagacagactatgttaaaagaaaaggcttcataactgtcgacggccgagagtctcccatggtgactgtggtgggagatggaaccatgctggatgtggagggtttgttctacctaggaggcctgccctcccagtaccaggccaggaaaattggaaatatcacccacagcatccctgcctgcattggggatgtgacggttaacagcaaacagctggacaaggacagcccggtgtctgccttcacggtgaacaggtgctacgcagtggcccaggaaggaacatactttgacggaagcggatatgcagctcttgtcaaagagggctacaaagtccagtcagatgtgaacatcacactggagtttcgaacctcctcgcagaatggcgtcctcctggggatcagcactgccaaagtggatgccattggactagagcttgtggacggcaaggtcttgttccatgtcaacaatggtgctggcaggataacagctgcatatgagcccaaaaccgccactgtgctctgtgatggaaaatggcacactcttcaagctaacaaaagcaaacaccgtatcactctgattgttgacgggaacgcagttggcgctgaaagtccacacacccagtctacctcagtggacaccaacaatcccatttatgttggtggctatcctgctggtgtgaagcaaaaatgcctgcgcagccagacctcgttccgcgggtgtttgaggaagctagctctgattaagagcccgcaggtgcagtcctttgacttcagcagagcgttcgaactgcacggagttttccttcattcctgtcctgggaccgagtcctgaacttcaagcagaatcctcagttggaatcattgctaatattttgaggagaagtgtatgtgtgaattaagaatctcttcagttcatatttcatttccaactcaggttaagtgtttctggggagagatgttgtgtttacgttacactaaaaccacatgtgcaacaaatacctccattaaatggtctaaaatgtaaattgaattccctggctctctttttaaacgtatttttaaaaaaatctttatacacattgaatgttctgttgattacttgatagtattttatgtttttcattttgagctttttaaaaaagtatcaatacagatgataacagatca

SEQ ID NO: 181 - DNA, 2637 bp, Homo sapiens
cgcccctcgccttctgcccgggcgctcgcagccgagcgcggccggggaagggctctcctcccagcgccgagcactgggccctggcagacgccccaagattgttgtgaggagtctagccagttggtgagcgctgtaatctgaaccagctgtgtccagactgaggccccatttgcattgtttaacatacttagaaaatgaagtgttcatttttaacattcctcctccaattggtttaatgctgaattactgaagagggctaagcaaaaccaggtgcttgcgctgagggctctgcagtggctgggaggaccccggcgctctccccgtgtcctctccacgactcgctcggcccctctggaataaaacacccgcgagccccgagggcccagaggaggccgacgtgcccgagctcctccgggggtcccgcccgcgagctttcttctcgccttcgcatctcctcctcgcgcgtcttggacatgccaggaataaaaaggatactcactgttaccattctggctctctgtcttccaagccctgggaatgcacaggcacagtgcacgaatggctttgacctggatcgccagtcaggacagtgtttagatattgatgaatgccgaaccatccccgaggcctgccgaggagacatgatgtgtgttaaccaaaatggcgggtatttatgcattccccggacaaaccctgtgtatcgagggccctactcgaacccctactcgaccccctactcaggtccgtacccagcagctgccccaccactctcagctccaaactatcccacgatctccaggcctcttatatgccgctttggataccagatggatgaaagcaaccaatgtgtggatgtggacgagtgtgcaacagattcccaccagtgcaaccccacccagatctgcatcaatactgaaggcgggtacacctgctcctgcaccgacggatattggcttctggaaggccagtgcttagacattgatgaatgtcgctatggttactgccagcagctctgtgcgaatgttcctggatcctattcttgtacatgcaaccctggttttaccctcaatgaggatggaaggtcttgccaagatgtgaacgagtgtgccaccgagaacccctgcgtgcaaacctgcgtcaacacctacggctctttcatctgccgctgtgacccaggatatgaacttgaggaagatggcgttcattgcagtgatatggacgagtgcagcttctctgagttcctctgccaacatgagtgtgtgaaccagcccggcacatacttctgctcctgccctccaggctacatcctgctggatgacaaccgaagctgccaagacatcaacgaatgtgagcacaggaaccacacgtgcaacctgcagcagacgtgctacaatttacaagggggcttcaaatgcattgaccccatccgctgtgaggagccttatctgaggatcagtgataaccgctgtatgtgtcctgctgagaaccctggctgcagagaccagccctttaccatcttgtaccgggacatggacgtggtgtcaggacgctccgttcccgctgacatcttccaaatgcaagccacgacccgctaccctggggcctattacattttccagatcaaatctgggaatgagggcagagaattttacatgcggcaaacgggccccatcagtgccaccctggtgatgacacgccccatcaaagggccccgggaaatccagctggacttggaaatgatcactgtcaacactgtcatcaacttcagaggcagctccgtgatccgactgcggatatatgtgtcgcagtacccattctgagcctcgggctggagcctccgacgctgcctctcattggcaccaagggacaggagaagagaggaaataacagagagaatgagagcgacacagacgttaggcatttcctgctgaacgtttccccgaagagtcagccccgacttcctgactctcacctgtactattgcagacctgtcaccctgcaggacttgccacccccagttcctatgacacagttatcaaaaagtattatcattgctcccctgatagaagattgttggtgaattttcaaggccttcagtttatttccactattttcaaagaaaatagattaggtttgcgggggtctgagtctatgttcaaagactgtgaacagcttgctgtcacttcttcacctcttccactccttctctcactgtgttactgctttgcaaagacccgggagctggcggggaaccctgggagtagctagtttgctttttgcgtacacagagaaggctatgtaaacaaaccacagcaggatcgaagggtttttagagaatgtgtttcaaaaccatgcctggtattttcaaccataaaagaagtttcagttgtccttaaatttgtataacggtttaattctgtcttgttcattttgagtatttttaaaaaatatgtcgtagaattccttcgaaaggccttcagacacatgctatgttctgtcttcccaaacccagtctcctctccattttagcccagtgttttctttgaggaccccttaatcttgctttctttagaatttttacccaattggattggaatgcagaggtctccaaactgattaaatatttgaagagaaaaa

SEQ ID NO: 182 - protein, 77 aa, Homo sapiens
VPLSRTVRCTCISISNQPVNPRSLEKLEIIPASQFCPRVEIIATMKKKGEKRCLNPESKAIKNLLKAVSKERSKRSP

SEQ ID NO: 183 - protein, 368 aa, Homo sapiens
MVLEVSDHQVLNDAEVAALLENFSSSYDYGENESDSCCTSPPCPQDFSLNFDRAFLPALYSLLFLLGLLGNGAVAAVLLSRRTALSSTDTFLLHLAVADTLLVLTLPLWAVDAAVQWVFGSGLCKVAGALFNINFYAGALLLACISFDRYLNIVHATQLYRRGPPARVTLTCLAVWGLCLLFALPDFIFLSAHHDERLNATHCQYNFPQVGRTALRVLQLVAGFLLPLLVMAYCYAHILAVLLVSRGQRRLRAMRLVVVVVVAFALCWTPYHLVVLVDILMDLGALARNCGRESRVDVAKSVTSGLGYMHCCLNPLLYAFVGVKFRERMWMLLLRLGCPNQRGLQRQPSSSRRDSSWSETSEASYSGL

SEQ ID NO: 184 - protein, 415 aa, Homo sapiens
MELRKYGPGRLAGTVIGGAAQSKSQTKSDSITKEFLPGLYTAPSSPFPPSQVSDHQVLNDAEVAALLENFSSSYDYGENESDSCCTSPPCPQDFSLNFDRAFLPALYSLLFLLGLLGNGAVAAVLLSRRTALSSTDTFLLHLAVADTLLVLTLPLWAVDAAVQWVFGSGLCKVAGALFNINFYAGALLLACISFDRYLNIVHATQLYRRGPPARVTLTCLAVWGLCLLFALPDFIFLSAHHDERLNATHCQYNFPQVGRTALRVLQLVAGFLLPLLVMAYCYAHILAVLLVSRGQRRLRAMRLVVVVVVAFALCWTPYHLVVLVDILMDLGALARNCGRESRVDVAKSVTSGLGYMHCCLNPLLYAFVGVKFRERMWMLLLRLGCPNQRGLQRQPSSSRRDSSWSETSEASYSGL

SEQ ID NO: 185 - protein, 97 aa, Homo sapiens
MKVSAALLWLLLIAAAFSPQGLAGPASVPTTCCFNLANRKIPLQRLESYRRITSGKCPQKAVIFKTKLAKDICADPKKKWVQDSMKYLDQKSPTPKP

SEQ ID NO: 186 - protein, 374 aa, Homo sapiens
MLSTSRSRFIRNTNESGEEVTTFFDYDYGAPCHKFDVKQIGAQLLPPLYSLVFIFGFVGNMLVVLILINCKKLKCLTDIYLLNLAISDLLFLITLPLWAHSAANEWVFGNAMCKLFTGLYHIGYFGGIFFIILLTIDRYLAIVHAVFALKARTVTFGVVTSVITWLVAVFASVPGIIFTKCQKEDSVYVCGPYFPRGWNNFHTIMRNILGLVLPLLIMVICYSGILKTLLRCRNEKKRHRAVRVIFTIMIVYFLFWTPYNIVILLNTFQEFFGLSNCESTSQLDQATQVTETLGMTHCCINPIIYAFVGEKFRSLFHIALGCRIAPLQKPVCGGPGVRPGKNVKVTTQGLLDGRGKGKSIGRAPEASLQDKEGA

SEQ ID NO: 187 - protein, 360 aa, Homo sapiens
MLSTSRSRFIRNTNESGEEVTTFFDYDYGAPCHKFDVKQIGAQLLPPLYSLVFIFGFVGNMLVVLILINCKKLKCLTDIYLLNLAISDLLFLITLPLWAHSAANEWVFGNAMCKLFTGLYHIGYFGGIFFIILLTIDRYLAIVHAVFALKARTVTFGVVTSVITWLVAVFASVPGIIFTKCQKEDSVYVCGPYFPRGWNNFHTIMRNILGLVLPLLIMVICYSGILKTLLRCRNEKKRHRAVRVIFTIMIVYFLFWTPYNIVILLNTFQEFFGLSNCESTSQLDQATQVTETLGMTHCCINPIIYAFVGEKFRRYLSVFFRKHITKRFCKQCPVFYRETVDGVTSTNTPSTGEQEVSAGL

SEQ ID NO: 188 - protein, 355 aa, Homo sapiens
MTTSLDTVETFGTTSYYDDVGLLCEKADTRALMAQFVPPLYSLVFTVGLLGNVVVVMILIKYRRLRIMTNIYLLNLAISDLLFLVTLPFWIHYVRGHNWVFGHGMCKLLSGFYHTGLYSEIFFIILLTIDRYLAIVHAVFALRARTVTFGVITSIVTWGLAVLAALPEFIFYETEELFEETLCSALYPEDTVYSWRHFHTLRMTIFCLVLPLLVMAICYTGIIKTLLRCPSKKKYKAIRLIFVIMAVFFIFWTPYNVAILLSSYQSILFGNDCERSKHLDLVMLVTEVIAYSHCCMNPVIYAFVGERFRKYLRHFFHRHLLMHLGRYIPFLPSEKLERTSSVSPSTAEPELSIVF

SEQ ID NO: 189 - protein, 376 aa, Homo sapiens
MPFGIRMLLRAHKPGSSRRSEMTTSLDTVETFGTTSYYDDVGLLCEKADTRALMAQFVPPLYSLVFTVGLLGNVVVVMILIKYRRLRIMTNIYLLNLAISDLLFLVTLPFWIHYVRGHNWVFGHGMCKLLSGFYHTGLYSEIFFIILLTIDRYLAIVHAVFALRARTVTFGVITSIVTWGLAVLAALPEFIFYETEELFEETLCSALYPEDTVYSWRHFHTLRMTIFCLVLPLLVMAICYTGIIKTLLRCPSKKKYKAIRLIFVIMAVFFIFWTPYNVAILLSSYQSILFGNDCERSKHLDLVMLVTEVIAYSHCCMNPVIYAFVGERFRKYLRHFFHRHLLMHLGRYIPFLPSEKLERTSSVSPSTAEPELSIVF

SEQ ID NO: 190 - protein, 373 aa, Homo sapiens
MPFGIRMLLRAHKPGRSEMTTSLDTVETFGTTSYYDDVGLLCEKADTRALMAQFVPPLYSLVFTVGLLGNVVVVMILIKYRRLRIMTNIYLLNLAISDLLFLVTLPFWIHYVRGHNWVFGHGMCKLLSGFYHTGLYSEIFFIILLTIDRYLAIVHAVFALRARTVTFGVITSIVTWGLAVLAALPEFIFYETEELFEETLCSALYPEDTVYSWRHFHTLRMTIFCLVLPLLVMAICYTGIIKTLLRCPSKKKYKAIRLIFVIMAVFFIFWTPYNVAILLSSYQSILFGNDCERSKHLDLVMLVTEVIAYSHCCMNPVIYAFVGERFRKYLRHFFHRHLLMHLGRYIPFLPSEKLERTSSVSPSTAEPELSIVF

SEQ ID NO: 191 - protein, 352 aa, Homo sapiens [sequence omitted]

SEQ ID NO: 192 - protein, 374 aa, Homo sapiens; identical to SEQ ID NO: 186

SEQ ID NO: 193 - protein, 360 aa, Homo sapiens; identical to SEQ ID NO: 187

SEQ ID NO: 194 - protein, 76 aa, Homo sapiens
QPDSVSIPITCCFNVINRKIPIQRLESYTRITNIQCPKEAVIFKTKRGKEVCADPKERWVRDSMKHLDQIFQNLKP

SEQ ID NO: 195 - protein, 97 aa, Homo sapiens
QPKVPEWVNTPSTCCLKYYEKVLPRRLVVGYRKALNCHLPAIIFVTKRNREVCTNPNDDWVQEYIKDPNLPLLPTRNLSTVKIITAKNGQPQLLNSQ

SEQ ID NO: 196 - protein, 369 aa, Homo sapiens
MTPTDFTSPIPNMADDYGSESTSSMEDYVNFNFTDFYCEKNNVRQFASHFLPPLYWLVFIVGALGNSLVILVYWYCTRVKTMTDMFLLNLAIADLLFLVTLPFWAIAAADQWKFQTFMCKVVNSMYKMNFYSCVLLIMCISVDRYIAIAQAMRAHTWREKRLLYSKMVCFTIWVLAAALCIPEILYSQIKEESGIAICTMVYPSDESTKLKSAVLTLKVILGFFLPFVVMACCYTIIIHTLIQAKKSSKHKALKVTITVLTVFVLSQFPYNCILLVQTIDAYAMFISNCAVSTNIDICFQVTQTIAFFHSCLNPVLYVFVGERFRRDLVKTLKNLGCISQAQWVSFTRREGSLKLSSMLLETTSGALSL

SEQ ID NO: 197 - protein, 357 aa, Homo sapiens
MADDYGSESTSSMEDYVNFNFTDFYCEKNNVRQFASHFLPPLYWLVFIVGALGNSLVILVYWYCTRVKTMTDMFLLNLAIADLLFLVTLPFWAIAAADQWKFQTFMCKVVNSMYKMNFYSCVLLIMCISVDRYIAIAQAMRAHTWREKRLLYSKMVCFTIWVLAAALCIPEILYSQIKEESGIAICTMVYPSDESTKLKSAVLTLKVILGFFLPFVVMACCYTIIIHTLIQAKKSSKHKALKVTITVLTVFVLSQFPYNCILLVQTIDAYAMFISNCAVSTNIDICFQVTQTIAFFHSCLNPVLYVFVGERFRRDLVKTLKNLGCISQAQWVSFTRREGSLKLSSMLLETTSGALSL

SEQ ID NO: 198 - protein, 127 aa, Homo sapiens
QGVFEDCCLAYHYPIGWAVLRRAWTYRIQEVSGSCNLPAAIFYLPKRHRKVCGNPKSREVQRAMKLLDARNKVFAKLHHNTQTFQAGPHAVKKLSSGNSKLSSSKFSNPISSSKRNVSLLISANSGL

SEQ ID NO: 199 - protein, 126 aa, Homo sapiens
QGVFEDCCLAYHYPIGWAVLRRAWTYRIQEVSGSCNLPAAIFYLPKRHRKVCGNPKSREVQRAMKLLDARNKVFAKLHHNTQTFQGPHAVKKLSSGNSKLSSSKFSNPISSSKRNVSLLISANSGL

SEQ ID NO: 200 - protein, 350 aa, Homo sapiens
  misc_feature (31)..(31): Xaa can be any naturally occurring amino acid
MSNITDPQMWDFDDLNFTGMPPADEDYSPCXLETETLNKYVVIIAYALVFLLSLLGNSLVMLVILYSRVGRSVTDVYLLNLALADLLFALTLPIWAASKVNGWIFGTFLCKVVSLLKEVNFYSGILLLACISVDRYLAIVHATRTLTQKRHLVKFVCLGCWGLSMNLSLPFFLFRQAYHPNNSSPVCYEVLGNDTAKWRMVLRILPHTFGFIVPLFVMLFCYGFTLRTLFKAHMGQKHRAMRVIFAVVLIFLLCWLPYNLVLLADTLMRTQVIQESCERRNNIGRALDATEILGFLHSCLNPIIYAFIGQNFRHGFLKILAMHGLVSKEFLARHRVTSYTSSSVNVSSNL

SEQ ID NO: 201 - protein, 360 aa, Homo sapiens
MEDFNMESDSFEDFWKGEDLSNYSYSSTLPPFLLDAAPCEPESLEINKYFVVIIYALVFLLSLLGNSLVMLVILYSRVGRSVTDVYLLNLALADLLFALTLPIWAASKVNGWIFGTFLCKVVSLLKEVNFYSGILLLACISVDRYLAIVHATRTLTQKRYLVKFICLSIWGLSLLLALPVLLFRRTVYSSNVSPACYEDMGNNTANWRMLLRILPQSFGFIVPLLIMLFCYGFTLRTLFKAHMGQKHRAMRVIFAVVLIFLLCWLPYNLVLLADTLMRTQVIQETCERRNHIDRALDATEILGILHSCLNPLIYAFIGQKFRHGLLKILAIHGLISKDSLPKDSRPSFVGSSSGHTSTTL

SEQ ID NO: 202 - protein, 107 aa, Homo sapiens
MARAALSAAPSNPRLLRVALLLLLLVAAGRRAAGASVATELRCQCLQTLQGIHPKNIQSVNVKSPGPHCAQTEVIATLKNGRKACLNPASPIVKKIIEKMLNSDKSN

SEQ ID NO: 203 - protein, 107 aa, Homo sapiens
MARATLSAAPSNPRLLRVALLLLLLVAASRRAAGAPLATELRCQCLQTLQGIHLKNIQSVKVKSPGPHCAQTEVIATLKNGQKACLNPASPMVKKIIEKMLKNGKSN

SEQ ID NO: 204 - protein, 73 aa, Homo sapiens
ASVVTELRCQCLQTLQGIHLKNIQSVNVRSPGPHCAQTEVIATLKNGKKACLNPASPMVQKIIEKILNKGSTN

SEQ ID NO: 205 - protein, 101 aa, Homo sapiens
MSSAAGFCASRPGLLFLGLLLLPLVVAFASAEAEEDGDLQCLCVKTTSQVRPRHITSLEVIKAGPHCPTAQLIATLKNGRKICLDLQAPLYKKIIKKLLES

SEQ ID NO: 206 - protein, 114 aa, Homo sapiens
MSLLSSRAARVPGPSSSLCALLVLLLLLTQPGPIASAGPAAAVLRELRCVCLQTTQGVHPKMISNLQVFAIGPQCSKVEVVASLKNGKEICLDPEAPFLKKVIQKILDGGNKEN

SEQ ID NO: 207 - protein, 77 aa, Homo sapiens
GPVSAVLTELRCTCLRVTLRVNPKTIGKLQVFPAGPQCSKVEVVASLKNGKQVCLDPEAPFLKKVIQKILDSGNKKN

SEQ ID NO: 208 - protein, 128 aa, Homo sapiens
MSLRLDTTPSCNSARPLHALQVLLLLSLLLTALASSTKGQTKRNLAKGKEESLDSDLYAELRCMCIKTTSGIHPKNIQSLEVIGKGTHCNQVEVIATLKDGRKICLDPDAPRIKKIVQKKLAGDESAD

SEQ ID NO: 209 - protein, 79 aa, Homo sapiens
EGAVLPRSAKELRCQCIKTYSKPFHPKFIKELRVIESGPHCANTEIIVKLSDGRELCLDPKENWVQRVVEKFLKRAENS

SEQ ID NO: 210 - protein, 75 aa, Homo sapiens
EGAVLPRSAKELRCQCIKTYSKPFHPKFIKELRVIESGPHCANTEIIVKLSDGRELCLDPKENWVQRVVEKFLKR
